(19) United States
(12) Patent Application Publication
(10) Pub. No.: US 2003/0148410 A1
(43) Pub. Date: Aug. 7, 2003

(54) Novel genes, compositions, kits, and methods for identification, assessment, prevention, and therapy of colon cancer

(75) Inventors: Allison Berger, Watertown, MA (US); Tracy L. Guillemette, Plaistow, NH (US); Robert Schlegel, Auburndale, MA (US); John E. Monahan, Walpole, MA (US); Shubhangi Kamatkar, Newton, MA (US); Stephen N. Thibodeau, Rochester, MN (US); Lawrence J. Burgart, Rochester, MN (US)

Correspondence Address: Theodore R. Allen, Millennium Pharmaceuticals, Inc., 75 Sidney Street, Cambridge, MA, 02139, US

(73) Assignee: Millennium Pharmaceuticals, Inc.

(21) Appl. No.: 10/301,822

(22) Filed: Nov. 21, 2002

Related U.S. Application Data
(60) Provisional application No. 60/339,971, filed on Dec. 10, 2001.
(60) Provisional application No. 60/361,978, filed on Mar. 5, 2002.
(60) Provisional application No. 60/381,988, filed on May 20, 2002.

(51) Int. Cl. G01N 33/574; C07H 21/04; C12P 21/02; C12N 5/06; C12N 9/00; C07K 14/47

(52) U.S. Cl. 435/7.23; 435/69.3; 435/183; 435/320.1; 435/325; 530/350; 536/23.2

(57) ABSTRACT

The invention relates to newly discovered nucleic acid molecules and proteins associated with colon cancer. Compositions, kits, and methods for detecting, characterizing, preventing, and treating human colon cancers are provided.

### RELATED APPLICATIONS

[0001] The present application claims priority from U.S. provisional patent application serial No. 60/339,971, filed on Dec. 10, 2001, and from U.S. provisional patent application serial No. 60/361,978, filed on Mar. 5, 2002. The present application also claims priority from U.S. provisional patent application serial No. 60/381,988, filed on May 20, 2002. All of the above applications are expressly incorporated by reference.

### FIELD OF THE INVENTION

[0002] The field of the invention is colon cancer, including diagnosis, characterization, management, and therapy of colon cancer.

### BACKGROUND OF THE INVENTION

[0003] The increased number of cancer cases reported in the United States, and, indeed, around the world, is a major concern. Currently there are only a handful of detection and treatment methods available for specific types of cancer, and these provide no absolute guarantee of success. In order to be most effective, these treatments require not only an early detection of the malignancy, but also a reliable assessment of the severity of the malignancy.

[0004] Colon and rectal cancers are malignant conditions which occur in the corresponding segments of the large intestine. These cancers are sometimes referred to jointly as “colorectal cancer” (CRC), and, in many respects, the diseases are considered identical. The major differences between them are the sites where the malignant growths occur and the fact that treatments may differ based on the location of the tumors.

[0005] More than 95 percent of cancers of the colon and rectum are adenocarcinomas, which develop in glandular cells lining the inside (lumen) of the colon and rectum. In addition to adenocarcinomas, there are other rarer types of cancers of the large intestine: these include carcinoid tumors usually found in the appendix and rectum; gastrointestinal stromal tumors found in connective tissue in the wall of the colon and rectum; and lymphomas, which are malignancies of immune cells in the colon, rectum and lymph nodes. As with other malignant conditions, a number of genetic abnormalities have been associated with colon tumors (Bos et al, (1987) Nature 327:293-297; Baker et al, (1989) 244:217-221; Nishisho et al, (1991) 253:665-669).

[0006] Colon cancer is the third leading cause of cancer deaths in the United States. Each year over 100,000 new cases are diagnosed, and 50,000 patients die from the disease. In large part this death rate is due to the inability to diagnose the disease at an early stage (Wanebo (1993) Colorectal Cancer, Mosby, St. Louis Mo.). In fact, the prognosis for a case of colon cancer is vastly enhanced when malignant tissue is detected at the early stage known as polyps. Simple removal of malignant polyps (polypectomy) through colonoscopy is now routine, and curing the condition from this procedure is effectively guaranteed. However, early detection of polyps and tumors depends on diligent and ongoing examination of patients at risk. The most reliable detection procedures to date include fecal occult blood tests, sigmoidoscopy, barium enema X-ray, digital rectal exam, and colonoscopy. Normally a malignant colon cancer will not cause noticeable symptoms (e.g., bowel obstruction, abdominal pain, anemia) until it has reached an advanced and far more serious stage of malignancy. At these stages, only risky and invasive procedures are available, including chemotherapy, radiation therapy, and colonectomy.

[0007] It would therefore be desirable to provide methods and reagents for the early diagnosis, staging, prognosis, monitoring, and treatment of diseases associated with colon cancer, or to indicate a predisposition to such for preventative measures.

### SUMMARY OF THE INVENTION

[0008] Table 1 lists all of the markers of the invention, which are over-expressed in colon cancer cells compared to normal (i.e., non-cancerous) colon cells and comprises markers listed in Tables 2 and 3. Table 2 lists newly-identified nucleotide and amino acid sequences useful as colon cancer markers. Table 3 lists newly-identified nucleic acid sequences useful as colon cancer markers.

[0009] Tables 1-3 list the markers which are designated with a name (“Marker”), the name the gene is commonly known by, if applicable (“Gene Name”), the Sequence Listing identifier of the cDNA sequence of a nucleotide transcript encoded by or corresponding to the marker (“SEQ ID NO (nts)”), the Sequence Listing identifier of the amino acid sequence of a protein encoded by the nucleotide transcript (“SEQ ID NO (AAs)”), and the location of the protein coding sequence within the cDNA sequence (“CDS”).

[0010] The invention further provides marker proteins encoded by or corresponding to the markers as well as antibodies, antibody derivatives and antibody fragments which specifically bind with the marker proteins and/or fragments of the marker proteins of the present invention.

[0011] The invention also relates to various methods, reagents and kits for diagnosing, staging, prognosing, monitoring and treating colon cancer. “Colon cancer” as used herein includes carcinomas, (e.g., carcinoma in situ, invasive carcinoma, metastatic carcinoma) and early stage malignant conditions, (e.g., adenomatous polyps). In one aspect, the invention relates to various diagnostic, monitoring, test and other methods related to colon cancer detection and therapy. In one embodiment, the invention provides a diagnostic method of assessing whether a patient has colon cancer or has higher than normal risk for developing colon cancer, comprising the steps of comparing the level of expression of a marker of the invention in a patient sample and the normal level of expression of the marker in a control, e.g., a sample from a patient without colon cancer. A significantly higher level of expression of the marker in the patient sample as compared to the normal level is an indication that the patient is afflicted with colon cancer or has higher than normal risk for developing colon cancer.

[0012] According to the invention, the markers are selected such that the positive predictive value of the methods of the invention is at least about 10%, preferably about 25%, more preferably about 50% and most preferably about 90%. Also preferred for use in the methods of the invention are markers that are differentially expressed, as compared to normal colon cells, by at least two-fold in at least about 20%, more preferably about 50% and most preferably about 75% of any of the following conditions, for example, stage Tis colon cancer patients, stage T0 colon cancer patients, stage T1 colon cancer patients, stage T2 colon cancer patients, stage T3 colon cancer patients, stage T4 colon cancer patients.

[0013] In a preferred diagnostic method of assessing whether a patient is afflicted with colon cancer (e.g., new detection (“screening”), detection of recurrence, reflex testing), the method comprises comparing:

[0014] a) the level of expression of a marker of the invention in a patient sample, and

[0015] b) the normal level of expression of the marker in a control non-colon cancer sample.

[0016] A significantly higher level of expression of the marker in the patient sample as compared to the normal level is an indication that the patient is afflicted with colon cancer.

[0017] The invention also provides diagnostic methods for assessing the efficacy of a therapy for inhibiting colon cancer in a patient. Such methods comprise comparing:

[0018] a) expression of a marker of the invention in a first sample obtained from the patient prior to providing at least a portion of the therapy to the patient, and

[0019] b) expression of the marker in a second sample obtained from the patient following provision of the portion of the therapy.

[0020] A significantly lower level of expression of the marker in the second sample relative to that in the first sample is an indication that the therapy is efficacious for inhibiting colon cancer in the patient. It will be appreciated that in these methods the “therapy” may be any therapy for treating colon cancer including, but not limited to, chemotherapy, radiation therapy, surgical removal of tumor tissue, gene therapy and biologic therapy such as the administering of antibodies and chemokines. Thus, the methods of the invention may be used to evaluate a patient before, during and after therapy, for example, to evaluate the reduction in tumor burden.

[0021] In a preferred embodiment, the diagnostic methods are directed to therapy using a chemical or biologic agent. These methods comprise comparing:

[0022] a) expression of a marker of the invention in a first sample obtained from the patient and maintained in the presence of the chemical or biologic agent, and

[0023] b) expression of the marker in a second sample obtained from the patient and maintained in the absence of the agent.

[0024] A significantly lower level of expression of the marker in the first sample relative to that in the second sample is an indication that the agent is efficacious for inhibiting colon cancer in the patient. In one embodiment, the first and second samples can be portions of a single sample obtained from the patient or portions of pooled samples obtained from the patient.

[0025] The invention additionally provides a monitoring method for assessing the progression of colon cancer in a patient, the method comprising:

[0026] a) detecting in a patient sample at a first time point, the expression of a marker of the invention;

[0027] b) repeating step a) at a subsequent time point in time; and

[0028] c) comparing the level of expression detected in steps a) and b), and therefrom monitoring the progression of colon cancer in the patient.

[0029] A significantly higher level of expression of the marker in the sample at the subsequent time point from that of the sample at the first time point is an indication that the colon cancer has progressed, whereas a significantly lower level of expression is an indication that the colon cancer has regressed.

[0030] The invention further provides a diagnostic method for determining whether colon cancer has metastasized or is likely to metastasize in the future, the method comprising comparing:

[0031] a) the level of expression of a marker of the invention in a patient sample, and

[0032] b) the normal level (or non-metastatic level) of expression of the marker in a control sample.

[0033] A significantly higher level of expression in the patient sample as compared to the normal level (or non-metastatic level) is an indication that the colon cancer has metastasized or is likely to metastasize in the future.

[0034] The invention moreover provides a test method for selecting a composition for inhibiting colon cancer in a patient. This method comprises the steps of:

[0035] a) obtaining a sample comprising cancer cells from the patient;

[0036] b) separately maintaining aliquots of the sample in the presence of a plurality of test compositions;

[0037] c) comparing expression of a marker of the invention in each of the aliquots; and

[0038] d) selecting one of the test compositions which significantly reduces the level of expression of the marker in the aliquot containing that test composition, relative to the levels of expression of the marker in the presence of the other test compositions.

[0039] The invention additionally provides a test method of assessing the colon carcinogenic potential of a compound. This method comprises the steps of:

[0040] a) maintaining separate aliquots of colon cells in the presence and absence of the compound; and

[0041] b) comparing expression of a marker of the invention in each of the aliquots.

[0042] A significantly higher level of expression of the marker in the aliquot maintained in the presence of the compound, relative to that of the aliquot maintained in the absence of the compound, is an indication that the compound possesses colon carcinogenic potential.

[0043] In addition, the invention further provides a method of inhibiting colon cancer in a patient. This method comprises the steps of:

[0044] a) obtaining a sample comprising colon cancer cells from the patient;

[0045] b) separately maintaining aliquots of the sample in the presence of a plurality of compositions;

[0046] c) comparing expression of a marker of the invention in each of the aliquots; and

[0047] d) administering to the patient at least one of the compositions which significantly lowers the level of expression of the marker in the aliquot containing that composition, relative to the levels of expression of the marker in the presence of the other compositions.

[0048] In the aforementioned methods, the samples or patient samples comprise cells obtained from the patient. The cells may be from a colon tissue sample, or found in a colon smear collected, for example, by colonoscopy. In another embodiment, the sample is a body fluid. Such fluids include, for example, blood fluids, stool, colon lavage fluids and lymph fluids. In a further embodiment, the patient sample is in vivo.

[0049] According to the invention, the level of expression of a marker of the invention in a sample can be assessed, for example, by detecting the presence in the sample of:

[0050] a corresponding marker protein or a fragment of the protein (e.g. by using a reagent, such as an antibody, an antibody derivative, an antibody fragment or single-chain antibody, which binds specifically with the protein or protein fragment)

[0051] a corresponding marker nucleic acid or a fragment of the nucleic acid (e.g. by contacting transcribed polynucleotides obtained from the sample with a substrate having affixed thereto one or more nucleic acids having the entire or a segment of the sequence of any of the marker nucleic acids, or a complement thereof)

[0052] a metabolite which is produced directly (i.e., catalyzed) or indirectly by a corresponding marker protein.

[0053] According to the invention, any of the aforementioned methods may be performed using a plurality (e.g. 2, 3, 5, or 10 or more) of colon cancer markers, including colon cancer markers known in the art. In such methods, the level of expression in the sample of each of a plurality of markers, at least one of which is a marker of the invention, is compared with the normal level of expression of each of the plurality of markers in samples of the same type obtained from control humans not afflicted with colon cancer. A significantly altered (i.e., increased or decreased as specified in the above-described methods using a single marker) level of expression in the sample of one or more markers of the invention, or some combination thereof, relative to that marker's corresponding normal or control level, is an indication that the patient is afflicted with colon cancer. For all of the aforementioned methods, the marker(s) are preferably selected such that the positive predictive value of the method is at least about 10%.

[0054] In a further aspect, the invention provides an antibody, an antibody derivative, or an antibody fragment, which binds specifically with a marker protein or a fragment of the protein. The invention also provides methods for making such antibody, antibody derivative, and antibody fragment. Such methods may comprise immunizing a mammal with a protein or peptide comprising the entirety, or a segment of 10 or more amino acids, of a marker protein, wherein the protein or peptide may be obtained from a cell or by chemical synthesis. The methods of the invention also encompass producing monoclonal and single-chain antibodies, which would further comprise isolating splenocytes from the immunized mammal, fusing the isolated splenocytes with an immortalized cell line to form hybridomas, and screening individual hybridomas for those that produce an antibody that binds specifically with a marker protein or a fragment of the protein.

[0055] In another aspect, the invention relates to various diagnostic and test kits. In one embodiment, the invention provides a kit for assessing whether a patient is afflicted with colon cancer. The kit comprises a reagent for assessing expression of a marker of the invention. In another embodiment, the invention provides a kit for assessing the suitability of a chemical or biologic agent for inhibiting colon cancer in a patient. Such a kit comprises a reagent for assessing expression of a marker of the invention, and may also comprise one or more of such agents. In a further embodiment, the invention provides kits for assessing the presence of colon cancer cells or treating colon cancers. Such kits comprise an antibody, an antibody derivative, or an antibody fragment, which binds specifically with a marker protein, or a fragment of the protein. Such kits may also comprise a plurality of antibodies, antibody derivatives, or antibody fragments wherein the plurality of such antibody agents binds specifically with a marker protein, or a fragment of the protein.

[0056] In an additional embodiment, the invention also provides a kit for assessing the presence of colon cancer cells, wherein the kit comprises a nucleic acid probe that binds specifically with a marker nucleic acid or a fragment of the nucleic acid. The kit may also comprise a plurality of probes, wherein each of the probes binds specifically with a marker nucleic acid, or a fragment of the nucleic acid.

[0057] In a further aspect, the invention relates to methods for treating a patient afflicted with or at risk of developing colon cancer. Such methods may comprise reducing the expression and/or interfering with the biological function of a marker of the invention. In one embodiment, the method comprises providing to the patient an antisense oligonucleotide or polynucleotide complementary to a marker nucleic acid, or a segment thereof. For example, an antisense polynucleotide may be provided to the patient through the delivery of a vector that expresses an anti-sense polynucleotide of a marker nucleic acid or a fragment thereof. In another embodiment, the method comprises providing to the patient an antibody, an antibody derivative, or antibody fragment, which binds specifically with a marker protein or a fragment of the protein. In a preferred embodiment, the antibody, antibody derivative or antibody fragment binds specifically with a marker protein or a fragment thereof.

[0058] It will be appreciated that the methods and kits of the present invention may also include known cancer markers including known colon cancer markers. It will further be appreciated that the methods and kits may be used to identify other types of cancers such as breast, ovarian, cervical, prostate and lung cancers.

### DETAILED DESCRIPTION OF THE INVENTION

[0059] The invention relates to newly discovered colon cancer markers associated with the cancerous state of colon cells. It has been discovered that the higher than normal level of expression of any of these markers or combination of these markers correlates with the presence of colon cancer. Methods are provided for detecting the presence of colon cancer in a sample, the absence of colon cancer in a sample, the stage of a colon cancer, and with other characteristics of colon cancer, that are relevant to prevention, diagnosis, characterization, and therapy of colon cancer in a patient. Methods of treating colon cancer are also provided.

[0060] Table 1 lists all of the markers of the invention, which are over-expressed in colon cancer cells compared to normal (i.e., non-cancerous) colon cells and comprises markers listed in Tables 2 and 3. Table 2 lists newly-identified nucleotide and amino acid sequences useful as colon cancer markers. Table 3 lists newly-identified nucleic acid sequences useful as colon cancer markers. Tables 1-3 provide the Sequence Listing identifier number of the cDNA sequence of an RNA transcript encoded by each marker, as well as the location of the protein coding sequence within the cDNA sequence.

TABLE 1

| | | SEQ ID | SEQ ID | |
|---|---|---|---|---|
| Marker | Gene Name | NO (nts) | NO (AAs) | CDS |
| M623 | ADAM 12: a disintegrin and | 1 | 2 | 307 . . . 3036 |
| | metalloproteinase domain 12 (meltrin | | | |
| | alpha) | | | |
| M688 | ADAMTS2: a disintegrin-like and | 3 | 4 | 82 . . . 3717 |
| | metalloprotease (reprolysin type) with | | | |
| | thrombospondin type 1 motif, 2 | | | |
| M624 | APOE: apolipoprotein E | 5 | 6 | 61 . . . 1014 |
| M88 | AREG: amphiregulin (schwannoma- | 7 | 8 | 210 . . . 968 |
| | derived growth factor) | | | |
| M625 | BMP7: bone morphogenetic protein 7 | 9 | 10 | 123 . . . 1418 |
| | (osteogenic protein 1) | | | |
| M626 | CA9: carbonic anhydrase IX | 11 | 12 | 43 . . . 1422 |
| M689 | CDCA7: cell division cycle associated 7, | 13 | 14 | 145 . . . 1497 |
| | variant 1 | | | |
| M690 | CDCA7: cell division cycle associated 7, | 15 | 16 | 145 . . . 1260 |
| | variant 2 | | | |
| M627 | CDH3: cadherin 3, type 1, P-cadherin | 17 | 18 | 71 . . . 2560 |
| | (placental) | | | |
| M628 | CEACAM6: carcinoembryonic antigen- | 19 | 20 | 41 . . . 1075 |
| | related cell adhesion molecule 6 (non- | | | |
| | specific cross reacting antigen) | | | |
| M10 | CLDN1: claudin 1 | 21 | 22 | 221 . . . 856 |
| M691 | CLDN2: claudin 2 | 23 | 24 | 231 . . . 923 |
| M205 | COL12A1: collagen, type XII, alpha 1 | 25 | 26 | 1 . . . 9192 |
| M12 | COL1A1: collagen, type I, alpha 1, | 27 | 28 | 120 . . . 4514 |
| | variant 1 | | | |
| M494 | COL1A1: collagen, type I, alpha 1, | 29 | 28 | 120 . . . 4514 |
| | variant 2 | | | |
| M13 | COL1A2: collagen, type I, alpha 2 | 30 | 31 | 140 . . . 4240 |
| M206 | COL3A1: collagen, type III, alpha 1 | 32 | 33 | 103 . . . 4503 |
| | (Ehlers-Danlos syndrome type IV, | | | |
| | autosomal dominant) | | | |
| M570 | COL5A2: collagen, type V, alpha 2 | 34 | 35 | 158 . . . 4648 |
| M14 | COL8A1: collagen, type VIII, alpha 1, | 36 | 37 | 1 . . . 2235 |
| | variant 1 | | | |
| M692 | COL8A1: collagen, type VIII, alpha 1, | 38 | 39 | 238 . . . 2472 |
| | variant 2 | | | |
| M102 | COMP: cartilage oligomeric matrix | 40 | 41 | 26 . . . 2299 |
| | protein (pseudoachondroplasia, | | | |
| | epiphyseal dysplasia 1, multiple) | | | |
| M629 | CTSB: cathepsin B | 42 | 43 | 178 . . . 1197 |
| M693 | CXCL1: chemokine (C-X-C motif) ligand | 44 | 45 | 80 . . . 403 |
| | 1 (melanoma growth stimulating activity, | | | |
| | alpha) | | | |
| OV40 | DD96: epithelial protein up-regulated in | 46 | 47 | 202 . . . 546 |
| | carcinoma, membrane associated | | | |
| | protein 17 | | | |
| M82 | DKFZp564I1922: adlican | 48 | 49 | 1 . . . 8487 |
| M630 | DPEP1: dipeptidase 1 (renal) | 50 | 51 | 296 . . . 1531 |
| M631 | EREG: epiregulin | 52 | 53 | 167 . . . 676 |
| M118 | FAP: fibroblast activation protein, alpha | 54 | 55 | 209 . . . 2491 |
| M632 | FLJ20015: hypothetical protein | 56 | 57 | 32 . . . 523 |
| | FLJ20015 | | | |
| M633 | FLJ20315: hypothetical protein | 58 | 59 | 169 . . . 2520 |
| | FLJ20315 | | | |
| M22 | FLJ20500: hypothetical protein | 60 | 61 | 198 . . . 896 |
| | FLJ20500 | | | |
| M634 | FLJ22041: hypothetical protein | 62 | 63 | 61 . . . 1506 |
| | FLJ22041 similar to FK506 binding | | | |
| | proteins | | | |
| M635 | FLJ32212: weakly similar to SPIDROIN | 64 | 65 | 403 . . . 1173 |
| | 1 | | | |
| M694 | FLJ35207: hypothetical protein | 66 | 67 | 100 . . . 2265 |
| | FLJ35207 | | | |
| M695 | GGH: gamma-glutamyl hydrolase | 68 | 69 | 60 . . . 1016 |
| | (conjugase, folylpolygammaglutamyl | | | |
| | hydrolase) | | | |
| M636 | GRO3: GRO3 oncogene | 70 | 71 | 78 . . . 398 |
| M495 | GSTP1: glutathione S-transferase pi | 72 | 73 | 30 . . . 662 |
| OV11 | HAIK1: type I intermediate filament | 74 | 75 | 61 . . . 1329 |
| | cytokeratin | | | |
| M138 | HSECP1: secretory protein | 76 | 77 | 27 . . . 863 |
| M637 | HTRA3: serine protease HTRA3 | 78 | 79 | 222 . . . 1580 |
| M638 | IFITM1: interferon induced | 80 | 81 | 111 . . . 488 |
| | transmembrane protein 1 (9-27) | | | |
| M31 | IFITM2: interferon induced | 82 | 83 | 280 . . . 678 |
| | transmembrane protein 2 (1-8D) | | | |
| M639 | IGFBP7: insulin-like growth factor | 84 | 85 | 23 . . . 871 |
| | binding protein 7 | | | |
| M33 | IL8RA: interleukin 8 | 86 | 87 | 75 . . . 374 |
| M34 | INHBA: inhibin, beta A (activin A, activin | 88 | 89 | 86 . . . 1366 |
| | AB alpha polypeptide) | | | |
| M277 | KCNN4: potassium intermediate/small | 90 | 91 | 397 . . . 1680 |
| | conductance calcium-activated channel, | | | |
| | subfamily N, member 4 | | | |
| M696 | KIAA1728: KIAA1728 protein | 92 | 93 | 240 . . . 4904 |
| OV32 | KLK10: kallikrein 10 | 94 | 95 | 82 . . . 912 |
| OV33 | KLK6: kallikrein 6 (neurosin, zyme) | 96 | 97 | 246 . . . 980 |
| OV53 | LC27: putative integral membrane | 98 | 99 | 204 . . . 1055 |
| | transporter | | | |
| OV37 | LCN2: lipocalin 2 (oncogene 24p3) | 100 | 101 | 1 . . . 597 |
| M697 | LOC147111: similar to OK/SW-CL.30 | 102 | 103 | 448 . . . 1938 |
| M640 | LOC94105: Thy-1 co-transcribed | 104 | 105 | 167 . . . 595 |
| M641 | LOX: lysyl oxidase | 106 | 107 | 230 . . . 1484 |
| M41 | LUM: lumican | 108 | 109 | 85 . . . 1101 |
| M43 | MAGP: microfibrillar-associated protein | 110 | 111 | 115 . . . 666 |
| | 2 precursor, transcript variant 1 | | | |
| M44 | MAGP: microfibrillar-associated protein | 112 | 113 | 100 . . . 651 |
| | 2 precursor, transcript variant 2 | | | |
| M45 | MAPK: mitogen-activated protein kinase | 114 | 115 | 328 . . . 1410 |
| | 1 | | | |
| M46 | MDK: midkine (neurite growth- | 116 | 117 | 26 . . . 457 |
| | promoting factor 2) | | | |
| M642 | MMP1: matrix metalloproteinase 1 | 118 | 119 | 72 . . . 1481 |
| | (interstitial collagenase) | | | |
| M158 | MMP11: matrix metalloproteinase 11 | 120 | 121 | 23 . . . 1489 |
| | preproprotein; stromelysin 3 | | | |
| M48 | MMP12: matrix metalloproteinase 12 | 122 | 123 | 13 . . . 1425 |
| M643 | MMP2: matrix metalloproteinase 2 | 124 | 125 | 290 . . . 2272 |
| | (gelatinase A, 72 kD gelatinase, 72kD | | | |
| | type IV collagenase) | | | |
| M49 | MMP3: matrix metalloproteinase 3, | 126 | 127 | 64 . . . 1497 |
| | stromelysin 1, progelatinase | | | |
| M294 | MMP7: matrix metalloproteinase 7 | 128 | 129 | 48 . . . 851 |
| | (matrilysin, uterine), PUMP1 proteinase, | | | |
| | variant 1 | | | |
| OV52 | MMP7: matrix metalloproteinase 7 | 130 | 129 | 28 . . . 831 |
| | (matrilysin, uterine), PUMP1 proteinase, | | | |
| | variant 2 | | | |
| M50 | MMP9: matrix metalloproteinase 9, | 131 | 132 | 20 . . . 2143 |
| | gelatinase B, 92 kD gelatinase, 92 kD | | | |
| | type IV collagenase | | | |
| OV70 | MSLN: mesothelin, variant 1 | 133 | 134 | 88 . . . 1950 |
| OV72 | MSLN: mesothelin, variant 2 | 135 | 136 | 88 . . . 1926 |
| M159 | MTHFD2: methylene tetrahydrofolate | 137 | 138 | 16 . . . 1050 |
| | dehydrogenase (NAD + dependent), | | | |
| | methenyltetrahydrofolate | | | |
| | cyclohydrolase, variant 1 | | | |
| M496 | MTHFD2: methylene tetrahydrofolate | 139 | 138 | 77 . . . 1111 |
| | dehydrogenase (NAD + dependent), | | | |
| | methenyltetrahydrofolate | | | |
| | cyclohydrolase, variant 2 | | | |
| M51 | MYBL2: v-myb avian myeloblastosis | 140 | 141 | 128 . . . 2230 |
| | viral oncogene homolog-like 2 | | | |
| OV48 | OPN-a: Secreted phosphoprotein-1 | 142 | 143 | 1 . . . 942 |
| | (osteopontin, bone sialoprotein) | | | |
| OV49 | OPN-b: Secreted phosphoprotein-1 | 144 | 145 | 88 . . . 990 |
| | (osteopontin, bone sialoprotein) | | | |
| OV50 | OPN-c: Secreted phosphoprotein-1 | 146 | 147 | 1 . . . 861 |
| | (osteopontin, bone sialoprotein) | | | |
| M490 | OSF-2: osteoblast specific factor 2 | 148 | 149 | 12 . . . 2522 |
| | (fasciclin I-like);OSF-2os | | | |
| M491 | OSF-2: osteoblast specific factor 2; | 150 | 151 | 28 . . . 2367 |
| | OSF-2p1 | | | |
| M167 | PCSK1: proprotein convertase | 152 | 153 | 190 . . . 2451 |
| | subtilisin/kexin type 1 | | | |
| M698 | PHLDA1: pleckstrin homology-like | 154 | 155 | 160 . . . 1362 |
| | domain, family A, member 1 | | | |
| M644 | PIGPC1: p53-induced protein PIGPC1, | 156 | 157 | 73 . . . 654 |
| | variant 1 | | | |
| M645 | PIGPC1: p53-induced protein PIGPC1, | 158 | 159 | 73 . . . 654 |
| | variant 2 | | | |
| M58 | PLAU: plasminogen activator, urokinase | 160 | 161 | 77 . . . 1372 |
| M646 | PLCB4: phospholipase C, beta 4 | 162 | 163 | 231 . . . 3299 |
| M647 | PMX1: paired mesoderm homeo box 1, | 164 | 165 | 1038 . . . 1691 |
| | isoform pmx-1a | | | |
| M648 | PMX1: paired mesoderm homeo box 1, | 166 | 167 | 1038 . . . 1775 |
| | isoform pmx-1b | | | |
| M699 | POFUT1: protein O-fucosyltransferase | 168 | 169 | 50 . . . 1216 |
| | 1 | | | |
| M649 | PP1665: hypothetical protein PP1665 | 170 | 171 | 955 . . . 1338 |
| M700 | QPCT: glutaminyl-peptide | 172 | 173 | 12 . . . 1097 |
| | cyclotransferase (glutaminyl cyclase) | | | |
| M416 | RAB22B: small GTP-binding protein | 174 | 175 | 129 . . . 716 |
| | RAB22B | | | |
| M471 | S100A11: S100 calcium-binding protein | 176 | 177 | 121 . . . 438 |
| | A11 (calgizzarin) | | | |
| M652 | SCYA3: small inducible cytokine A3 | 178 | 179 | 80 . . . 361 |
| M419 | SCYB10: small inducible cytokine | 180 | 181 | 67 . . . 363 |
| | subfamily B (Cys-X-Cys), member 10 | | | |
| M701 | SDBCAG84: serologically defined | 182 | 183 | 28 . . . 1179 |
| | breast cancer antigen 84 | | | |
| M702 | SERPINE2: serine (or cysteine) | 184 | 185 | 210 . . . 1406 |
| | proteinase inhibitor, clade E (nexin, | | | |
| | plasminogen activator inhibitor type 1), | | | |
| | member 2 | | | |
| M650 | SERPINH2: serine (or cysteine) | 186 | 187 | 88 . . . 1344 |
| | proteinase inhibitor, clade H (heat | | | |
| | shock protein 47), member 2 | | | |
| M651 | SFRP4: secreted frizzled-related protein | 188 | 189 | 238 . . . 1278 |
| | 4 | | | |
| M653 | SLC12A2: solute carrier family 12 | 190 | 191 | 165 . . . 3803 |
| | (sodium/potassium/chloride | | | |
| | transporters), member 2 | | | |
| M70 | SPARC: osteonectin (secreted protein, | 192 | 193 | 58 . . . 969 |
| | acidic, cysteine-rich) | | | |
| M186 | SPN: asporin (LRR class 1) | 194 | 195 | 247 . . . 810 |
| M654 | SRPUL: sushi-repeat protein | 196 | 197 | 419 . . . 1816 |
| M703 | TEM8: tumor endothelial marker 8 | 198 | 199 | 144 . . . 1838 |
| M704 | TGFBI: transforming growth factor, | 200 | 201 | 48 . . . 2099 |
| | beta-induced, 68 kDa | | | |
| M655 | THBS2: thrombospondin 2 | 202 | 203 | 240 . . . 3758 |
| M705 | TIMP1: tissue inhibitor of | 204 | 205 | 63 . . . 686 |
| | metalloproteinase 1 (erythroid | | | |
| | potentiating activity, collagenase | | | |
| | inhibitor) | | | |
| M72 | TK1: thymidine kinase 1, soluble | 206 | 207 | 58 . . . 762 |
| M324 | TMEPAI: PMEPA1 protein | 208 | 209 | 96 . . . 854 |
| | (transmembrane, prostate androgen | | | |
| | induced) | | | |
| M74 | TOP2A: topoisomerase (DNA) II alpha | 210 | 211 | 37 . . . 4632 |
| | (170kD) | | | |
| M706 | TRIM29: tripartite motif-containing 29 | 212 | 213 | 125 . . . 1891 |
| M656 | TSC: hypothetical protein FLJ20607, | 214 | 215 | 29 . . . 832 |
| | variant 1 | | | |
| M657 | TSC: hypothetical protein FLJ20607, | 216 | 217 | 49 . . . 699 |
| | variant 2 | | | |
| M658 | TSC: hypothetical protein FLJ20607, | 218 | 217 | 49 . . . 699 |
| | variant 3 | | | |
| M659 | TSC: hypothetical protein FLJ20607, | 219 | 220 | 49 . . . 804 |
| | variant 4 | | | |
| M76 | UBCH10: ubiquitin carrier protein E2-C | 221 | 222 | 41 . . . 580 |
| M77 | UBD: diubiquitin | 223 | 224 | 19 . . . 516 |
| M194 | unnamed gene (1) | 225 | 226 | 23 . . . 1066 |
| M660 | unnamed gene (2) | 227 | 228 | 351 . . . 1895 |

[0061] TABLE 2

| | | SEQ ID | SEQ ID | |
|---|---|---|---|---|
| Marker | Gene Name | NO (nts) | NO (AAs) | CDS |
| M688 | ADAMTS2: a disintegrin-like and | 3 | 4 | 82 . . . 3717 |
| | metalloprotease (reprolysin type) with | | | |
| | thrombospondin type 1 motif, 2 | | | |
| M697 | LOC147111: similar to OK/SW-CL.30 | 102 | 103 | 448 . . . 1938 |
| OV70 | MSLN: mesothelin, variant 1 | 133 | 134 | 88 . . . 1950 |
| OV72 | MSLN: mesothelin, variant 2 | 135 | 136 | 88 . . . 1926 |
| M644 | PIGPC1: p53-induced protein | 156 | 157 | 73 . . . 654 |
| | PIGPC1, variant 1 | | | |
| M659 | TSC: hypothetical protein FLJ20607, | 219 | 220 | 49 . . . 804 |
| | variant 4 | | | |
| M194 | unnamed gene (1) | 225 | 226 | 23 . . . 1066 |
| M660 | unnamed gene (2) | 227 | 228 | 351 . . . 1895 |

[0062] TABLE 3

| | | SEQ ID | SEQ ID | |
|---|---|---|---|---|
| Marker | Gene Name | NO (nts) | NO (AAs) | CDS |
| M623 | ADAM12: a disintegrin and | 1 | 2 | 307 . . . 3036 |
| | metalloproteinase domain 12 (meltrin | | | |
| | alpha) | | | |
| M205 | COL12A1: collagen, type XII, alpha 1 | 25 | 26 | 1 . . . 9192 |
| M692 | COL8A1: collagen, type VIII, alpha 1, | 38 | 39 | 238 . . . 2472 |
| | variant 2 | | | |
| M632 | FLJ20015: hypothetical protein | 56 | 57 | 32 . . . 523 |
| | FLJ20015 | | | |
| M640 | LOC94105: Thy-1 co-transcribed | 104 | 105 | 167 . . . 595 |
| M641 | LOX: lysyl oxidase | 106 | 107 | 230 . . . 1484 |
| M645 | PIGPC1: p53-induced protein PIGPC1, | 158 | 159 | 73 . . . 654 |
| | variant 2 | | | |
| M647 | PMX1: paired mesoderm homeo box 1, | 164 | 165 | 1038 . . . 1691 |
| | isoform pmx-1a | | | |
| M648 | PMX1: paired mesoderm homeo box 1, | 166 | 167 | 1038 . . . 1775 |
| | isoform pmx-1b | | | |
| M653 | SLC12A2: solute carrier family 12 | 190 | 191 | 165 . . . 3803 |
| | (sodium/potassium/chloride | | | |
| | transporters), member 2 | | | |
| M658 | TSC: hypothetical protein FLJ20607, | 218 | 217 | 49 . . . 699 |
| | variant 3 | | | |

[0063] Definitions

[0064] As used herein, each of the following terms has the meaning associated with it in this section.

[0065] The articles “a” and “an” are used herein to refer to one or to more than one (i.e. to at least one) of the grammatical object of the article. By way of example, “an element” means one element or more than one element.

[0066] A “marker” or “marker gene” is a gene whose altered level of expression in a tissue or cell from its expression level in normal or healthy tissue or cell is associated with a disease state, such as cancer. A “marker nucleic acid” is a nucleic acid (e.g., RNA, DNA) comprising or corresponding to (in case of cDNA) the complete or partial sequence of a RNA transcript encoded by a marker gene, or the complement of such complete or partial sequence. A “marker protein” is a protein encoded by or corresponding to a marker of the invention (e.g., a protein encoded by a marker nucleic acid). The terms “protein” and “polypeptide” are used interchangeably.

[0067] A “marker set” is a group of more than one marker.

[0068] The term “probe” refers to any molecule which is capable of selectively binding to a specifically intended target molecule, for example, a nucleotide transcript or protein encoded by or corresponding to a marker. Probes can be either synthesized by one skilled in the art, or derived from appropriate biological preparations. For purposes of detection of the target molecule, probes may be specifically designed to be labeled, as described herein. Examples of molecules that can be utilized as probes include, but are not limited to, RNA, DNA, proteins, antibodies, and organic molecules.

[0069] A “colon-associated” body fluid is a fluid which, when in the body of a patient, contacts or passes through colon cells or into which cells or proteins shed from colon cells are capable of passing. Exemplary colon-associated body fluids include blood fluids, stool, colon lavage fluids and lymph fluids.

[0070] The “normal” level of expression of a marker is the level of expression of the marker in colon cells of a human subject or patient not afflicted with colon cancer.

[0071] An “over-expression” or “significantly higher level of expression” of a marker refers to an expression level in a test sample that is greater than the standard error of the assay employed to assess expression, and is preferably at least twice, and more preferably three, four, five or ten times the expression level of the marker in a control sample (e.g., sample from a healthy subjects not having the marker associated disease) and preferably, the average expression level of the marker in several control samples.

[0072] A “significantly lower level of expression” of a marker refers to an expression level in a test sample that is at least twice, and more preferably three, four, five or ten times lower than the expression level of the marker in a control sample (e.g., sample from a healthy subject not having the marker associated disease) and preferably, the average expression level of the marker in several control samples.

[0073] As used herein, the term “promoter/regulatory sequence” means a nucleic acid sequence which is required for expression of a gene product operably linked to the promoter/regulatory sequence. In some instances, this sequence may be the core promoter sequence and in other instances, this sequence may also include an enhancer sequence and other regulatory elements which are required for expression of the gene product. The promoter/regulatory sequence may, for example, be one which expresses the gene product in a tissue-specific manner.

[0074] A “constitutive” promoter is a nucleotide sequence which, when operably linked with a polynucleotide which encodes or specifies a gene product, causes the gene product to be produced in a living human cell under most or all physiological conditions of the cell.

[0075] An “inducible” promoter is a nucleotide sequence which, when operably linked with a polynucleotide which encodes or specifies a gene product, causes the gene product to be produced in a living human cell substantially only when an inducer which corresponds to the promoter is present in the cell.

[0076] A “tissue-specific” promoter is a nucleotide sequence which, when operably linked with a polynucleotide which encodes or specifies a gene product, causes the gene product to be produced in a living human cell substantially only if the cell is a cell of the tissue type corresponding to the promoter.

[0077] A “transcribed polynucleotide” or “nucleotide transcript” is a polynucleotide (e.g. an mRNA, hnRNA, a cDNA, or an analog of such RNA or cDNA) which is identical to, complementary to or homologous with all or a portion of a RNA transcript encoded by a marker gene.

[0078] “Complementary” refers to the broad concept of sequence complementarity between regions of two nucleic acid strands or between two regions of the same nucleic acid strand. It is known that an adenine residue of a first nucleic acid region is capable of forming specific hydrogen bonds (“base pairing”) with a residue of a second nucleic acid region which is antiparallel to the first region if the residue is thymine or uracil. Similarly, it is known that a cytosine residue of a first nucleic acid strand is capable of base pairing with a residue of a second nucleic acid strand which is antiparallel to the first strand if the residue is guanine. A first region of a nucleic acid is complementary to a second region of the same or a different nucleic acid if, when the two regions are arranged in an antiparallel fashion, at least one nucleotide residue of the first region is capable of base pairing with a residue of the second region. Preferably, the first region comprises a first portion and the second region comprises a second portion, whereby, when the first and second portions are arranged in an antiparallel fashion, at least about 50%, and preferably at least about 75%, at least about 90%, or at least about 95% of the nucleotide residues of the first portion are capable of base pairing with nucleotide residues in the second portion. More preferably, all nucleotide residues of the first portion are capable of base pairing with nucleotide residues in the second portion.

[0079] “Homologous” as used herein, refers to nucleotide sequence similarity between two regions of the same nucleic acid strand or between regions of two different nucleic acid strands. When a nucleotide residue position in both regions is occupied by the same nucleotide residue, then the regions are homologous at that position. A first region is homologous to a second region if at least one nucleotide residue position of each region is occupied by the same residue. Homology between two regions is expressed in terms of the proportion of nucleotide residue positions of the two regions that are occupied by the same nucleotide residue. By way of example, a region having the nucleotide sequence 5′-ATTGCC-3′ and a region having the nucleotide sequence 5′-TATGGC-3′ share 50% homology. Preferably, the first region comprises a first portion and the second region comprises a second portion, whereby, at least about 50%, and preferably at least about 75%, at least about 90%, or at least about 95% of the nucleotide residue positions of each of the portions are occupied by the same nucleotide residue. More preferably, all nucleotide residue positions of each of the portions are occupied by the same nucleotide residue.

[0080] A molecule is “fixed” or “affixed” to a substrate if it is covalently or non-covalently associated with the substrate such the substrate can be rinsed with a fluid (e.g. standard saline citrate, pH 7.4) without a substantial fraction of the molecule dissociating from the substrate.

[0081] As used herein, a “naturally-occurring” nucleic acid molecule refers to an RNA or DNA molecule having a nucleotide sequence that occurs in an organism found in nature.

[0082] A cancer is “inhibited” if at least one symptom of the cancer is alleviated, terminated, slowed, or prevented. As used herein, colon cancer is also “inhibited” if recurrence or metastasis of the cancer is reduced, slowed, delayed, or prevented.

[0083] A kit is any manufacture (e.g. a package or container) comprising at least one reagent, e.g. a probe, for specifically detecting the expression of a marker of the invention. The kit may be promoted, distributed, or sold as a unit for performing the methods of the present invention.

[0084] “Proteins of the invention” encompass marker proteins and their fragments; variant marker proteins and their fragments; peptides and polypeptides comprising an at least 15 amino acid segment of a marker or variant marker protein; and fusion proteins comprising a marker or variant marker protein, or an at least 15 amino acid segment of a marker or variant marker protein.

[0085] Unless otherwise specified herewithin, the terms “antibody” and “antibodies” broadly encompass naturally-occurring forms of antibodies (e.g., IgG, IgA, IgM, IgE) and recombinant antibodies such as single-chain antibodies, chimeric and humanized antibodies and multi-specific antibodies, as well as fragments and derivatives of all of the foregoing, which fragments and derivatives have at least an antigenic binding site. Antibody derivatives may comprise a protein or chemical moiety conjugated to an antibody.

[0086] Description

[0087] The present invention is based, in part, on newly identified markers which are over-expressed in colon cancer cells as compared to their expression in normal (i.e. non-cancerous) colon cells. The enhanced expression of one or more of these markers in a patient sample indicates the patient has or is likely to develop colon cancer. The invention provides compositions, kits, and methods for assessing the cancerous state of colon cells (e.g. cells obtained from a human, cultured human cells, archived or preserved human cells and in vivo cells) as well as treating patients afflicted with colon cancer.

[0088] The compositions, kits, and methods of the invention have the following uses, among others:

[0089] 1) assessing whether a patient is afflicted with colon cancer;

[0090] 2) assessing the stage of colon cancer in a human patient;

[0091] 3) assessing the grade of colon cancer in a patient;

[0092] 4) assessing the benign or malignant nature of colon cancer in a patient;

[0093] 5) assessing the presence of adenomatous polyps;

[0094] 6) assessing the presence of colon adenocarcinomas;

[0095] 7) assessing the metastatic potential of colon cancer in a patient;

[0096] 8) assessing the histological type of neoplasm associated with colon cancer in a patient;

[0097] 9) making antibodies, antibody fragments or antibody derivatives that are useful for treating colon cancer and/or assessing whether a patient is afflicted with colon cancer;

[0098] 10) assessing the presence of colon cancer cells;

[0099] 11) assessing the efficacy of one or more test compounds for inhibiting colon cancer in a patient;

[0100] 12) assessing the efficacy of a therapy for inhibiting colon cancer in a patient;

[0101] 13) monitoring the progression of colon cancer in a patient;

[0102] 14) selecting a composition or therapy for inhibiting colon cancer in a patient;

[0103] 15) treating a patient afflicted with colon cancer;

[0104] 16) detecting early onset colon cancer;

[0105] 17) detecting colon cancer in young patients;

[0106] 18) inhibiting colon cancer in a patient;

[0107] 19) assessing the colon carcinogenic potential of a test compound; and

[0108] 20) preventing the onset of colon cancer in a patient at risk for developing colon cancer.

[0109] The invention thus includes a method of assessing whether a patient is afflicted with colon cancer. This method comprises comparing the level of expression of a marker of the invention in a patient sample and the normal level of expression of the marker in a control, e.g., a non-colon cancer sample. A significantly higher level of expression of the marker in the patient sample as compared to the normal level is an indication that the patient is afflicted with colon cancer.

[0110] Any marker gene or combination of marker genes listed within Table 1, as well as any known colon cancer marker genes in combination with the marker genes set forth within Table 1, may be used in the compositions, kits, and methods of the present invention. In general, it is preferable to use marker genes for which the difference between the level of expression of the marker gene in colon cancer cells or colon-associated body fluids and the level of expression of the same marker gene in normal colon cells or colon-associated body fluids is as great as possible. Although this difference can be as small as the limit of detection of the method for assessing expression of the marker gene, it is preferred that the difference be at least greater than the standard error of the assessment method, and preferably a difference of at least 2-, 3-, 4-, 5-, 6-, 7-, 8-, 9-, 10-, 15-, 20-, 25-, 100-, 500-, 1000-fold or greater.

[0111] It will be appreciated that patient samples containing colon cells or colon cancer cells may be used in the methods of the present invention. In these embodiments, the level of expression of the marker gene can be assessed by assessing the amount (e.g. absolute amount or concentration) of a marker gene product (e.g., protein and RNA transcript encoded by the marker gene and fragments of the protein and RNA transcript) in a sample, e.g., stool and/or blood obtained from a patient. The sample can, of course, be subjected to a variety of well-known post-collection preparative and storage techniques (e.g. fixation, storage, freezing, lysis, homogenization, DNA or RNA extraction, ultrafiltration, concentration, evaporation, centrifugation, etc.) prior to assessing the amount of the marker gene product in the sample.

[0112] Preferred in vivo techniques for detection of a protein encoded by a marker gene of the invention include introducing into a subject an antibody that specifically binds the protein, or a polypeptide or protein fragment comprising the protein. In certain embodiments, the antibody can be labeled with a radioactive molecule whose presence and location in a subject can be detected by standard imaging techniques.

[0113] Expression of a marker gene of the invention may be assessed by any of a wide variety of well known methods for detecting expression of a transcribed molecule or encoded protein. Non-limiting examples of such methods include immunological methods for detection of secreted, cell-surface, cytoplasmic, or nuclear proteins, protein purification methods, protein function or activity assays, nucleic acid hybridization methods, nucleic acid reverse transcription methods, and nucleic acid amplification methods. Such method may also include physical methods such as liquid and gas chromatography, mass spectroscopy, and nuclear magnetic resonance.

[0114] In a preferred embodiment, expression of a marker gene is assessed using an antibody (e.g. a radio-labeled, chromophore-labeled, fluorophore-labeled, or enzyme-labeled antibody), an antibody derivative (e.g. an antibody conjugated with a substrate or with the protein or ligand of a protein-ligand pair {e.g. biotin-streptavidin}), or an antibody fragment (e.g. a single-chain antibody, an isolated antibody hypervariable domain, etc.) which binds specifically with a protein encoded by the marker gene or a polypeptide or a protein fragment comprising the protein, wherein the protein may have undergone none, all or a portion of its normal post-translational modification and/or proteolysis during the course of its secretion or release from colon cells, cancerous or otherwise.

[0115] In another preferred embodiment, expression of a marker gene is assessed by preparing mRNA/cDNA (i.e. a transcribed polynucleotide) from cells in a patient sample, and by hybridizing the mRNA/cDNA with a reference polynucleotide which comprises the marker gene sequence or its complement, or a fragment of said sequence or complement. cDNA can, optionally, be amplified using any of a variety of polymerase chain reaction methods prior to hybridization with the reference polynucleotide. Expression of one or more marker genes can likewise be detected using quantitative PCR to assess the level of RNA transcripts encoded by the marker gene(s).

[0116] In a related embodiment, a mixture of transcribed polynucleotides obtained from the sample is contacted with a substrate having fixed thereto a polynucleotide complementary to or homologous with at least a portion (e.g. at least 7, 10, 15, 20, 25, 30, 40, 50, 100, 500, or more nucleotide residues) of a RNA transcript encoded by a marker gene of the invention. If polynucleotides complementary to or homologous with a RNA transcript encoded by the marker gene of the invention are differentially detectable on the substrate (e.g. detectable using radioactivity, different chromophores or fluorophores), are fixed to different selected positions, then the levels of expression of a plurality of marker genes can be assessed simultaneously using a single substrate (e.g. a “gene chip” microarray of polynucleotides fixed at selected positions). When a method of assessing marker gene expression is used which involves hybridization of one nucleic acid with another, it is preferred that the hybridization be performed under stringent hybridization conditions.

[0117] Because the compositions, kits, and methods of the invention rely on detection of a difference in expression levels of one or more marker genes of the invention, it is preferable that the level of expression of the marker gene is significantly greater than the minimum detection limit of the method used to assess expression in at least one of normal colon cells and cancerous colon cells.

[0118] It is understood that by routine screening of additional patient samples for the expression levels of one or more of the marker genes of the invention, it will be realized that certain of the marker genes are over-expressed in cancers of various types, including specific colon cancers, as well as other cancers such as breast, cervical, prostate, lung or ovarian cancers. For example, it will be confirmed that some of the marker genes of the invention are over-expressed in most (i.e. 50% or more) or substantially all (i.e. 80% or more) of colon cancer. Furthermore, it will be confirmed that certain of the marker genes of the invention are associated with colon cancer of various stages.

[0119] All cancers have staging schemes that are used to describe the degree to which the cancer has progressed. A generally accepted scoring system, known as the TNM staging system, has been established by the American Joint Committee on Cancer (AJCC). The TNM system approach assigns the primary tumor to one of four stages (Tis, T0, T1, T2, T3, T4) based on the size and location of the primary tumor within the colon or rectum. The regional lymph node stage (N0, N1, N2, or N3) and level of distant metastases (M0 or M1) are indicated with each score as well. For example, colon Tis (in situ) cancer designates a tumor in its early polyp stage which has not grown beyond the inner lining of the mucosa. A T1 designation indicates a tumor which is 2 cm or less in its greatest dimension. Generally, a T1 colorectal tumor is at a stage where it has invaded the submucosa, but not the muscularis propria. A T1N1 designation refers to the same stage of tumor with 1-3 regional lymph node metastases. A T2 colorectal tumor is greater than 2 cm but not greater than 5 cm in its greatest dimension. Generally, a T2 colorectal tumor is at a stage where it has penetrated into, but not through, the muscularis propria. In all forms of stage T3 disease the tumors have extended through the wall of the colon into surrounding tissue. The T4 designation refers to tumors that have escaped from the colon and can be found in distant regions. A description of the TNM system of colon cancer classification can be found in AJCC Cancer Staging Manual, Fifth Ed., Lippincott, Williams & Wilkins (1997) (ISBN: 0-397-58414-8).

[0120] It will thus be appreciated that as a greater number of patient samples are assessed for expression of the marker genes of the invention and the outcomes of the individual patients from whom the samples were obtained are correlated, it will also be confirmed that altered expression of certain of the marker genes of the invention are strongly correlated with malignant cancers and that altered expression of other marker genes of the invention are strongly correlated with benign tumors. The compositions, kits, and methods of the invention are thus useful for characterizing one or more of the stage, grade, histological type, metastatic potential, indolent vs. aggressive phenotype and benign/malignant nature of colon cancer in patients.

[0121] When the compositions, kits, and methods of the invention are used for characterizing one or more of the stage, grade, histological type, metastatic potential, indolent vs. aggressive phenotype and benign/malignant nature of colon cancer in a patient, it is preferred that the marker gene or panel of marker genes of the invention, whose expression level is assessed, is selected such that a positive result is obtained in at least about 20%, and preferably at least about 40%, 60%, or 80%, and more preferably in substantially all patients afflicted with a colon cancer of the corresponding stage, grade, histological type, metastatic potential, indolent vs. aggressive phenotype or benign/malignant nature. Preferably, the marker gene or panel of marker genes of the invention is selected such that a positive predictive value (PPV) of greater than about 10% is obtained for the general population.

[0122] When a plurality of marker genes of the invention are used in the methods of the invention, the level of expression of each marker gene in a patient sample can be compared with the normal level of expression of each of the plurality of marker genes in non-cancerous samples of the same type, either in a single reaction mixture (i.e. using reagents, such as different fluorescent probes, for each marker gene or a mixture of similiarly labeled probes to access expression level of a plurality of marker genes whose probes are fixed to a single substrate at different positions) or in individual reaction mixtures corresponding to one or more of the marker genes. In one embodiment, a significantly enhanced level of expression of more than one of the plurality of marker genes in the sample, relative to the corresponding normal levels, is an indication that the patient is afflicted with colon cancer. When the expression level of a plurality of marker genes is assessed, it is preferred that the expression level of 2, 3, 4, 5, 8, 10, 12, 15, 20, 30, or 40 or more individual marker genes is assessed.

[0123] In order to maximize the sensitivity of the compositions, kits, and methods of the invention (i.e. by interference attributable to cells of non-colon origin in a patient sample), it is preferable that the marker gene of the invention whose expression level is examined therein be a marker gene which is tissue specific, e.g., normally not expressed in non-colon tissue.

[0124] There are only a small number of marker genes whose expression are known to be associated with colon cancers (for example, c-met, L7a, APC; see Wang et al, (2000) Int. J. Oncol. 16:757-762, Nishisho et al, (1991) Science 253:665-669, Umeki et al, (1999) Oncology 56:314-321). These marker genes are not, of course, included among the marker genes of the invention, although they may be used together with one or more marker genes of the invention in a panel of marker genes, for example. It is well known that certain types of genes, such as oncogenes, tumor suppressor genes, growth factor-like genes, protease-like genes, and protein kinase-like genes are often involved with development of cancers of various types. Thus, among the marker genes of the invention, use of those which encode proteins which resemble known secreted proteins such as growth factors, proteases and protease inhibitors are preferred.

[0125] Known growth factors include platelet-derived growth factor alpha, platelet-derived growth factor beta (simian sarcoma viral {v-sis) oncogene homolog), thrombopoietin (myeloproliferative leukemia virus oncogene ligand, megakaryocyte growth and development factor), erythropoietin, B cell growth factor, macrophage stimulating factor 1 (hepatocyte growth factor-like protein), hepatocyte growth factor (hepapoietin A), insulin-like growth factor 1 (somatomedia C), hepatoma-derived growth factor, amphiregulin (schwannoma-derived growth factor), bone morphogenetic proteins 1, 2, 3, 3 beta, and 4, bone morphogenetic protein 7 (osteogenic protein 1), bone morphogenetic protein 8 (osteogenic protein 2), connective tissue growth factor, connective tissue activation peptide 3, epidermal growth factor (EGF), teratocarcinoma-derived growth factor 1, endothelin, endothelin 2, endothelin 3, stromal cell-derived factor 1, vascular endothelial growth factor (VEGF), VEGF-B, VEGF-C, placental growth factor (vascular endothelial growth factor-related protein), transforming growth factor alpha, transforming growth factor beta 1 and its precursors, transforming growth factor beta 2 and its precursors, fibroblast growth factor 1 (acidic), fibroblast growth factor 2 (basic), fibroblast growth factor 5 and its precursors, fibroblast growth factor 6 and its precursors, fibroblast growth factor 7 (keratinocyte growth factor), fibroblast growth factor 8 (androgen-induced), fibroblast growth factor 9 (glia-activating factor), pleiotrophin (heparin binding growth factor 8, neurite growth-promoting factor 1), brain-derived neurotrophic factor, and recombinant glial growth factor 2.

[0126] Known proteases include interleukin-1 beta convertase and its precursors, Mch6 and its precursors, Mch2 isoform alpha, Mch4, Cpp32 isoform alpha, Lice2 gamma cysteine protease, Ich-1S, Ich-1L, Ich-2 and its precursors, TY protease, matrix metalloproteinase 1 (interstitial collagenase), matrix metalloproteinase 2 (gelatinase A, 72 kD gelatinase, 72 kD type IV collagenase), matrix metalloproteinase 7 (matrilysin), matrix metalloproteinase 8 (neutrophil collagenase), matrix metalloproteinase 12 (macrophage elastase), matrix metalloproteinase 13 (collagenase 3), metallopeptidase 1, cysteine-rich metalloprotease (disintegrin) and its precursors, subtilisin-like protease Pc8 and its precursors, chymotrypsin, snake venom-like protease, cathepsin 1, cathepsin D (lysosomal aspartyl protease), stromelysin, aminopeptidase N, plasminogen, tissue plasminogen activator, plasminogen activator inhibitor type II, and urokinase-type plasminogen activator.

[0127] Gene delivery vehicles, host cells and compositions (all described herein) containing nucleic acids comprising the entirety, or a segment of 15 or more nucleotides, of any of the sequences of the invention, or the complement of such sequences, and polypeptides comprising the entirety, or a segment of 10 or more amino acids, of any of the proteins encoded by the markers of the invention are also provided by this invention.

[0128] As described herein, colon cancer in patients is associated with an increased level of expression of one or more markers of the invention. While, as discussed above, some of these changes in expression level result from occurrence of the colon cancer, others of these changes induce, maintain, and promote the cancerous state of colon cancer cells. Thus, colon cancer characterized by an increase in the level of expression of one or more markers of the invention can be inhibited by reducing and/or interfering with the expression of the markers and/or function of the proteins encoded by those markers.

[0129] Expression of a marker of the invention can be inhibited in a number of ways generally known in the art. For example, an antisense oligonucleotide can be provided to the colon cancer cells in order to inhibit transcription, translation, or both, of the marker(s). Alternately, a polynucleotide encoding an antibody, an antibody derivative, or an antibody fragment which specifically binds a marker protein, and operably linked with an appropriate promoter/regulator region, can be provided to the cell in order to generate intracellular antibodies which will inhibit the function or activity of the protein. The expression and/or function of a marker may also be inhibited by treating the colon cancer cell with an antibody, antibody derivative or antibody fragment that specifically binds a marker protein. Using the methods described herein, a variety of molecules, particularly including molecules sufficiently small that they are able to cross the cell membrane, can be screened in order to identify molecules which inhibit expression of a marker or inhibit the function of a marker protein. The compound so identified can be provided to the patient in order to inhibit colon cancer cells of the patient.

[0130] Any marker or combination of markers of the invention, as well as any known markers in combination with the markers of the invention, may be used in the compositions, kits, and methods of the present invention. In general, it is preferable to use markers for which the difference between the level of expression of the marker in colon cancer cells and the level of expression of the same marker in normal colon cells is as great as possible. Although this difference can be as small as the limit of detection of the method for assessing expression of the marker, it is preferred that the difference be at least greater than the standard error of the assessment method, and preferably a difference of at least 2-, 3-, 4-, 5-, 6-, 7-, 8-, 9-, 10-, 15-, 20-, 25-, 100-, 500-, 1000-fold or greater than the level of expression of the same marker in normal colon tissue.

[0131] It is recognized that certain marker proteins are secreted from colon cancer cells (i.e. one or both of normal and cancerous cells) to the extracellular space surrounding the cells. These markers are preferably used in certain embodiments of the compositions, kits, and methods of the invention, owing to the fact that the such marker proteins can be detected in a colon-associated body fluid sample, which may be more easily collected from a human patient than a tissue biopsy sample. In addition, preferred in vivo techniques for detection of a marker protein include introducing into a subject a labeled antibody directed against the protein. For example, the antibody can be labeled with a radioactive marker whose presence and location in a subject can be detected by standard imaging techniques.

[0132] It is a simple matter for the skilled artisan to determine whether any particular marker protein is a secreted protein. In order to make this determination, the marker protein is expressed in, for example, a mammalian cell, preferably a human colon cell line, extracellular fluid is collected, and the presence or absence of the protein in the extracellular fluid is assessed (e.g. using a labeled antibody which binds specifically with the protein).

[0133] The following is an example of a method which can be used to detect secretion of a protein. About 8×10⁵ 293T cells are incubated at 37° C. in wells containing growth medium (Dulbecco's modified Eagle's medium {DMEM} supplemented with 10% fetal bovine serum) under a 5% (v/v) CO₂, 95% air atmosphere to about 60-70% confluence. The cells are then transfected using a standard transfection mixture comprising 2 micrograms of DNA comprising an expression vector encoding the protein and 10 microliters of LipofectAMINE™ (GIBCO/BRL Catalog no. 18342-012) per well. The transfection mixture is maintained for about 5 hours, and then replaced with fresh growth medium and maintained in an air atmosphere. Each well is gently rinsed twice with DMEM which does not contain methionine or cysteine (DMEM-MC; ICN Catalog no. 16-424-54). About 1 milliliter of DMEM-MC and about 50 microcuries of Trans-³⁵S™ reagent (ICN Catalog no. 51006) are added to each well. The wells are maintained under the 5% CO₂ atmosphere described above and incubated at 37° C. for a selected period. Following incubation, 150 microliters of conditioned medium is removed and centrifuged to remove floating cells and debris. The presence of the protein in the supernatant is an indication that the protein is secreted.

[0134] It will be appreciated that patient samples containing colon cells or colon cancer cells may be used in the methods of the present invention. In these embodiments, the level of expression of the marker can be assessed by assessing the amount (e.g. absolute amount or concentration) of the marker in a colon cell sample, e.g., colon smear obtained from a patient. The cell sample can, of course, be subjected to a variety of well-known post-collection preparative and storage techniques (e.g., nucleic acid and/or protein extraction, fixation, storage, freezing, ultrafiltration, concentration, evaporation, centrifugation, etc.) prior to assessing the amount of the marker in the sample. Likewise, colon smears may also be subjected to post-collection preparative and storage techniques, e.g., fixation.

[0135] The compositions, kits, and methods of the invention can be used to detect expression of marker proteins having at least one portion which is displayed on the surface of cells which express it. It is a simple matter for the skilled artisan to determine whether a marker protein, or a portion thereof, is exposed on the cell surface. For example, immunological methods may be used to detect such proteins on whole cells, or well known computer-based sequence analysis methods (e.g. the SIGNALP program; Nielsen et al., 1997, Protein Engineering 10: 1-6) may be used to predict the presence of at least one extracellular domain (i.e. including both secreted proteins and proteins having at least one cell-surface domain). Expression of a marker protein having at least one portion which is displayed on the surface of a cell which expresses it may be detected without necessarily lysing the cell (e.g. using a labeled antibody which binds specifically with a cell-surface domain of the protein).

[0136] It is recognized that the compositions, kits, and methods of the invention will be of particular utility to patients having an enhanced risk of developing colon cancer and their medical advisors. Patients recognized as having an enhanced risk of developing colon cancer include, for example, patients having a familial history of colon cancer, patients identified as having a mutant oncogene (i.e. at least one allele). The level of expression of a marker in normal (i.e. non-cancerous) human colon tissue can be assessed in a variety of ways. In one embodiment, this normal level of expression is assessed by assessing the level of expression of the marker in a portion of colon cells which appears to be non-cancerous and by comparing this normal level of expression with the level of expression in a portion of the colon cells which is suspected of being cancerous. Alternately, and particularly as further information becomes available as a result of routine performance of the methods described herein, population-average values for normal expression of the markers of the invention may be used. In other embodiments, the ‘normal’ level of expression of a marker may be determined by assessing expression of the marker in a patient sample obtained from a non-cancer-afflicted patient, from a patient sample obtained from a patient before the suspected onset of colon cancer in the patient, from archived patient samples, and the like.

[0137] The invention includes compositions, kits, and methods for assessing the presence of colon cancer cells in a sample (e.g. an archived tissue sample or a sample obtained from a patient). These compositions, kits, and methods are substantially the same as those described above, except that, where necessary, the compositions, kits, and methods are adapted for use with samples other than patient samples. For example, when the sample to be used is a parafinized, archived human tissue sample, it can be necessary to adjust the ratio of compounds in the compositions of the invention, in the kits of the invention, or the methods used to assess levels of marker expression in the sample. Such methods are well known in the art and within the skill of the ordinary artisan.

[0138] The invention includes a kit for assessing the presence of colon cancer cells (e.g. in a sample such as a patient sample). The kit comprises a plurality of reagents, each of which is capable of binding specifically with a marker nucleic acid or protein. Suitable reagents for binding with a marker protein include antibodies, antibody derivatives, antibody fragments, and the like. Suitable reagents for binding with a marker nucleic acid (e.g. a genomic DNA, an mRNA, a spliced mRNA, a cDNA, or the like) include complementary nucleic acids. For example, the nucleic acid reagents may include oligonucleotides (labeled or non-labeled) fixed to a substrate, labeled oligonucleotides not bound with a substrate, pairs of PCR primers, molecular beacon probes, and the like.

[0139] The kit of the invention may optionally comprise additional components useful for performing the methods of the invention. By way of example, the kit may comprise fluids (e.g. SSC buffer) suitable for annealing complementary nucleic acids or for binding an antibody with a protein with which it specifically binds, one or more sample compartments, an instructional material which describes performance of a method of the invention, a sample of normal colon cells, a sample of colon cancer cells, and the like.

[0140] The invention also includes a method of making an isolated hybridoma which produces an antibody useful for assessing whether patient is afflicted with an colon cancer. In this method, a protein or peptide comprising the entirety or a segment of a marker protein is synthesized or isolated (e.g. by purification from a cell in which it is expressed or by transcription and translation of a nucleic acid encoding the protein or peptide in vivo or in vitro using known methods). A vertebrate, preferably a mammal such as a mouse, rat, rabbit, or sheep, is immunized using the protein or peptide. The vertebrate may optionally (and preferably) be immunized at least one additional time with the protein or peptide, so that the vertebrate exhibits a robust immune response to the protein or peptide. Splenocytes are isolated from the immunized vertebrate and fused with an immortalized cell line to form hybridomas, using any of a variety of methods well known in the art. Hybridomas formed in this manner are then screened using standard methods to identify one or more hybridomas which produce an antibody which specifically binds with the marker protein or a fragment thereof. The invention also includes hybridomas made by this method and antibodies made using such hybridomas.

[0141] The invention also includes a method of assessing the efficacy of a test compound for inhibiting colon cancer cells. As described above, differences in the level of expression of the markers of the invention correlate with the cancerous state of colon cells. Although it is recognized that changes in the levels of expression of certain of the markers of the invention likely result from the cancerous state of colon cells, it is likewise recognized that changes in the levels of expression of other of the markers of the invention induce, maintain, and promote the cancerous state of those cells. Thus, compounds which inhibit an colon cancer in a patient will cause the level of expression of one or more of the markers of the invention to change to a level nearer the normal level of expression for that marker (i.e. the level of expression for the marker in non-cancerous colon cells).

[0142] This method thus comprises comparing expression of a marker in a first colon cell sample and maintained in the presence of the test compound and expression of the marker in a second colon cell sample and maintained in the absence of the test compound. A significantly reduced expression of a marker of the invention in the presence of the test compound is an indication that the test compound inhibits colon cancer. The colon cell samples may, for example, be aliquots of a single sample of normal colon cells obtained from a patient, pooled samples of normal colon cells obtained from a patient, cells of a normal colon cell line, aliquots of a single sample of colon cancer cells obtained from a patient, pooled samples of colon cancer cells obtained from a patient, cells of an colon cancer cell line, or the like. In one embodiment, the samples are colon cancer cells obtained from a patient and a plurality of compounds known to be effective for inhibiting various colon cancers are tested in order to identify the compound which is likely to best inhibit the colon cancer in the patient.

[0143] This method may likewise be used to assess the efficacy of a therapy for inhibiting colon cancer in a patient. In this method, the level of expression of one or more markers of the invention in a pair of samples (one subjected to the therapy, the other not subjected to the therapy) is assessed. As with the method of assessing the efficacy of test compounds, if the therapy induces a significantly lower level of expression of a marker of the invention then the therapy is efficacious for inhibiting colon cancer. As above, if samples from a selected patient are used in this method, then alternative therapies can be assessed in vitro in order to select a therapy most likely to be efficacious for inhibiting colon cancer in the patient.

[0144] As described above, the cancerous state of human colon cells is correlated with changes in the levels of expression of the markers of the invention. The invention includes a method for assessing the human colon cell carcinogenic potential of a test compound. This method comprises maintaining separate aliquots of human colon cells in the presence and absence of the test compound. Expression of a marker of the invention in each of the aliquots is compared. A significantly higher level of expression of a marker of the invention in the aliquot maintained in the presence of the test compound (relative to the aliquot maintained in the absence of the test compound) is an indication that the test compound possesses human colon cell carcinogenic potential. The relative carcinogenic potentials of various test compounds can be assessed by comparing the degree of enhancement or inhibition of the level of expression of the relevant markers, by comparing the number of markers for which the level of expression is enhanced or inhibited, or by comparing both.

[0145] Various aspects of the invention are described in further detail in the following subsections.

[0146] I. Isolated Nucleic Acid Molecules

[0147] One aspect of the invention pertains to isolated nucleic acid molecules, including nucleic acids which encode a marker protein or a portion thereof. Isolated nucleic acids of the invention also include nucleic acid molecules sufficient for use as hybridization probes to identify marker nucleic acid molecules, and fragments of marker nucleic acid molecules, e.g., those suitable for use as PCR primers for the amplification or mutation of marker nucleic acid molecules. As used herein, the term “nucleic acid molecule” is intended to include DNA molecules (e.g., cDNA or genomic DNA) and RNA molecules (e.g., mRNA) and analogs of the DNA or RNA generated using nucleotide analogs. The nucleic acid molecule can be single-stranded or double-stranded, but preferably is double-stranded DNA.

[0148] An “isolated” nucleic acid molecule is one which is separated from other nucleic acid molecules which are present in the natural source of the nucleic acid molecule. Preferably, an “isolated” nucleic acid molecule is free of sequences (preferably protein-encoding sequences) which naturally flank the nucleic acid (i.e., sequences located at the 5′ and 3′ ends of the nucleic acid) in the genomic DNA of the organism from which the nucleic acid is derived. For example, in various embodiments, the isolated nucleic acid molecule can contain less than about 5 kB, 4 kB, 3 kB, 2 kB, 1 kB, 0.5 kB or 0.1 kB of nucleotide sequences which naturally flank the nucleic acid molecule in genomic DNA of the cell from which the nucleic acid is derived. Moreover, an “isolated” nucleic acid molecule, such as a cDNA molecule, can be substantially free of other cellular material, or culture medium when produced by recombinant techniques, or substantially free of chemical precursors or other chemicals when chemically synthesized.

[0149] A nucleic acid molecule of the present invention can be isolated using standard molecular biology techniques and the sequence information in the database records described herein. Using all or a portion of such nucleic acid sequences, nucleic acid molecules of the invention can be isolated using standard hybridization and cloning techniques (e.g., as described in Sambrook et al., ed., Molecular Cloning: A Laboratory Manual, 2nd ed., Cold Spring Harbor Laboratory Press, Cold Spring Harbor, N.Y., 1989).

[0150] A nucleic acid molecule of the invention can be amplified using cDNA, mRNA, or genomic DNA as a template and appropriate oligonucleotide primers according to standard PCR amplification techniques. The nucleic acid so amplified can be cloned into an appropriate vector and characterized by DNA sequence analysis. Furthermore, nucleotides corresponding to all or a portion of a nucleic acid molecule of the invention can be prepared by standard synthetic techniques, e.g., using an automated DNA synthesizer.

[0151] In another preferred embodiment, an isolated nucleic acid molecule of the invention comprises a nucleic acid molecule which has a nucleotide sequence complementary to the nucleotide sequence of a marker nucleic acid or to the nucleotide sequence of a nucleic acid encoding a marker protein. A nucleic acid molecule which is complementary to a given nucleotide sequence is one which is sufficiently complementary to the given nucleotide sequence that it can hybridize to the given nucleotide sequence thereby forming a stable duplex.

[0152] Moreover, a nucleic acid molecule of the invention can comprise only a portion of a nucleic acid sequence, wherein the full length nucleic acid sequence comprises a marker nucleic acid or which encodes a marker protein. Such nucleic acids can be used, for example, as a probe or primer. The probe/primer typically is used as one or more substantially purified oligonucleotides. The oligonucleotide typically comprises a region of nucleotide sequence that hybridizes under stringent conditions to at least about 7, preferably about 15, more preferably about 25, 50, 75, 100, 125, 150, 175, 200, 250, 300, 350, or 400 or more consecutive nucleotides of a nucleic acid of the invention.

[0153] Probes based on the sequence of a nucleic acid molecule of the invention can be used to detect transcripts or genormic sequences corresponding to one or more markers of the invention. The probe comprises a label group attached thereto, e.g., a radioisotope, a fluorescent compound, an enzyme, or an enzyme co-factor. Such probes can be used as part of a diagnostic test kit for identifying cells or tissues which mis-express the protein, such as by measuring levels of a nucleic acid molecule encoding the protein in a sample of cells from a subject, e.g., detecting mRNA levels or determining whether a gene encoding the protein has been mutated or deleted.

[0154] The invention further encompasses nucleic acid molecules that differ, due to degeneracy of the genetic code, from the nucleotide sequence of nucleic acids encoding a marker protein, and thus encode the same protein.

[0155] It will be appreciated by those skilled in the art that DNA sequence polymorphisms that lead to changes in the amino acid sequence can exist within a population (e.g., the human population). Such genetic polymorphisms can exist among individuals within a population due to natural allelic variation. An allele is one of a group of genes which occur alternatively at a given genetic locus. In addition, it will be appreciated that DNA polymorphisms that affect RNA expression levels can also exist that may affect the overall expression level of that gene (e.g., by affecting regulation or degradation).

[0156] As used herein, the phrase “allelic variant” refers to a nucleotide sequence which occurs at a given locus or to a polypeptide encoded by the nucleotide sequence.

[0157] As used herein, the terms “gene” and “recombinant gene” refer to nucleic acid molecules comprising an open reading frame encoding a polypeptide corresponding to a marker of the invention. Such natural allelic variations can typically result in 1-5% variance in the nucleotide sequence of a given gene. Alternative alleles can be identified by sequencing the gene of interest in a number of different individuals. This can be readily carried out by using hybridization probes to identify the same genetic locus in a variety of individuals. Any and all such nucleotide variations and resulting amino acid polymorphisms or variations that are the result of natural allelic variation and that do not alter the functional activity are intended to be within the scope of the invention.

[0158] In another embodiment, an isolated nucleic acid molecule of the invention is at least 7, 15, 20, 25, 30, 40, 60, 80, 100, 150, 200, 250, 300, 350, 400, 450, 550, 650, 700, 800, 900, 1000, 1200, 1400, 1600, 1800, 2000, 2200, 2400, 2600, 2800, 3000, 3500, 4000, 4500, or more nucleotides in length and hybridizes under stringent conditions to a marker nucleic acid or to a nucleic acid encoding a marker protein. As used herein, the term “hybridizes under stringent conditions” is intended to describe conditions for hybridization and washing under which nucleotide sequences at least 60% (65%, 70%, preferably 75%) identical to each other typically remain hybridized to each other. Such stringent conditions are known to those skilled in the art and can be found in sections 6.3.1-6.3.6 of Current Protocols in Molecular Biology, John Wiley & Sons, N.Y. (1989). A preferred, non-limiting example of stringent hybridization conditions are hybridization in 6×sodium chloride/sodium citrate (SSC) at about 45° C., followed by one or more washes in 0.2×SSC, 0.1% SDS at 50-65° C.

[0159] In addition to naturally-occurring allelic variants of a nucleic acid molecule of the invention that can exist in the population, the skilled artisan will further appreciate that sequence changes can be introduced by mutation thereby leading to changes in the amino acid sequence of the encoded protein, without altering the biological activity of the protein encoded thereby. For example, one can make nucleotide substitutions leading to amino acid substitutions at “non-essential” amino acid residues. A “non-essential” amino acid residue is a residue that can be altered from the wild-type sequence without altering the biological activity, whereas an “essential” amino acid residue is required for biological activity. For example, amino acid residues that are not conserved or only semi-conserved among homologs of various species may be non-essential for activity and thus would be likely targets for alteration. Alternatively, amino acid residues that are conserved among the homologs of various species (e.g., murine and human) may be essential for activity and thus would not be likely targets for alteration.

[0160] Accordingly, another aspect of the invention pertains to nucleic acid molecules encoding a variant marker protein that contain changes in amino acid residues that are not essential for activity. Such variant marker proteins differ in amino acid sequence from the naturally-occurring marker proteins, yet retain biological activity. In one embodiment, such a variant marker protein has an amino acid sequence that is at least about 40% identical, 50%, 60%, 70%, 80%, 90%, 95%, or 98% identical to the amino acid sequence of a marker protein.

[0161] An isolated nucleic acid molecule encoding a variant marker protein can be created by introducing one or more nucleotide substitutions, additions or deletions into the nucleotide sequence of marker nucleic acids, such that one or more amino acid residue substitutions, additions, or deletions are introduced into the encoded protein. Mutations can be introduced by standard techniques, such as site-directed mutagenesis and PCR-mediated mutagenesis. Preferably, conservative amino acid substitutions are made at one or more predicted non-essential amino acid residues. A “conservative amino acid substitution” is one in which the amino acid residue is replaced with an amino acid residue having a similar side chain. Families of amino acid residues having similar side chains have been defined in the art. These families include amino acids with basic side chains (e.g., lysine, arginine, histidine), acidic side chains (e.g., aspartic acid, glutamic acid), uncharged polar side chains (e.g., glycine, asparagine, glutamine, serine, threonine, tyrosine, cysteine), non-polar side chains (e.g., alanine, valine, leucine, isoleucine, proline, phenylalanine, methionine, tryptophan), beta-branched side chains (e.g., threonine, valine, isoleucine) and aromatic side chains (e.g., tyrosine, phenylalanine, tryptophan, histidine). Alternatively, mutations can be introduced randomly along all or part of the coding sequence, such as by saturation mutagenesis, and the resultant mutants can be screened for biological activity to identify mutants that retain activity. Following mutagenesis, the encoded protein can be expressed recombinantly and the activity of the protein can be determined.

[0162] The present invention encompasses antisense nucleic acid molecules, i.e., molecules which are complementary to a sense nucleic acid of the invention, e.g., complementary to the coding strand of a double-stranded marker cDNA molecule or complementary to a marker mRNA sequence. Accordingly, an antisense nucleic acid of the invention can hydrogen bond to (i.e. anneal with) a sense nucleic acid of the invention. The antisense nucleic acid can be complementary to an entire coding strand, or to only a portion thereof, e.g., all or part of the protein coding region (or open reading frame). An antisense nucleic acid molecule can also be antisense to all or part of a non-coding region of the coding strand of a nucleotide sequence encoding a marker protein. The non-coding regions (“5′ and 3′ untranslated regions”) are the 5′ and 3′ sequences which flank the coding region and are not translated into amino acids.

[0163] An antisense oligonucleotide can be, for example, about 5, 10, 15, 20, 25, 30, 35, 40, 45, or 50 or more nucleotides in length. An antisense nucleic acid of the invention can be constructed using chemical synthesis and enzymatic ligation reactions using procedures known in the art. For example, an antisense nucleic acid (e.g., an antisense oligonucleotide) can be chemically synthesized using naturally occurring nucleotides or variously modified nucleotides designed to increase the biological stability of the molecules or to increase the physical stability of the duplex formed between the antisense and sense nucleic acids, e.g., phosphorothioate derivatives and acridine substituted nucleotides can be used. Examples of modified nucleotides which can be used to generate the antisense nucleic acid include 5-fluorouracil, 5-bromouracil, 5-chlorouracil, 5-iodouracil, hypoxanthine, xanthine, 4-acetylcytosine, 5-(carboxyhydroxylmethyl) uracil, 5-carboxymethylaminomethyl-2-thiouridine, 5-carboxymethylaminomethyluracil, dihydrouracil, beta-D-galactosylqueosine, inosine, N6-isopentenyladenine, 1-methylguanine, 1-methylinosine, 2,2-dimethylguanine, 2-methyladenine, 2-methylguanine, 3-methylcytosine, 5-methylcytosine, N6-adenine, 7-methylguanine, 5-methylaminomethyluracil, 5-methoxyaminomethyl-2-thiouracil, beta-D-mannosylqueosine, 5′-methoxycarboxymethyluracil, 5-methoxyuracil, 2-methylthio-N6-isopentenyladenine, uracil-5-oxyacetic acid (v), wybutoxosine, pseudouracil, queosine, 2-thiocytosine, 5-methyl-2-thiouracil, 2-thiouracil, 4-thiouracil, 5-methyluracil, uracil-5-oxyacetic acid methylester, uracil-5-oxyacetic acid (v), 5-methyl-2-thiouracil, 3-(3-amino-3-N-2-carboxypropyl) uracil, (acp3)w, and 2,6-diaminopurine. Alternatively, the antisense nucleic acid can be produced biologically using an expression vector into which a nucleic acid has been sub-cloned in an antisense orientation (i.e., RNA transcribed from the inserted nucleic acid will be of an antisense orientation to a target nucleic acid of interest, described further in the following subsection).

[0164] The antisense nucleic acid molecules of the invention are typically administered to a subject or generated in situ such that they hybridize with or bind to cellular mRNA and/or genomic DNA encoding a marker protein to thereby inhibit expression of the marker, e.g., by inhibiting transcription and/or translation. The hybridization can be by conventional nucleotide complementarity to form a stable duplex, or, for example, in the case of an antisense nucleic acid molecule which binds to DNA duplexes, through specific interactions in the major groove of the double helix. Examples of a route of administration of antisense nucleic acid molecules of the invention includes direct injection at a tissue site or infusion of the antisense nucleic acid into a colon-associated body fluid. Alternatively, antisense nucleic acid molecules can be modified to target selected cells and then administered systemically. For example, for systemic administration, antisense molecules can be modified such that they specifically bind to receptors or antigens expressed on a selected cell surface, e.g., by linking the antisense nucleic acid molecules to peptides or antibodies which bind to cell surface receptors or antigens. The antisense nucleic acid molecules can also be delivered to cells using the vectors described herein. To achieve sufficient intracellular concentrations of the antisense molecules, vector constructs in which the antisense nucleic acid molecule is placed under the control of a strong pol II or pol III promoter are preferred.

[0165] An antisense nucleic acid molecule of the invention can be an α-anomeric nucleic acid molecule. An α-anomeric nucleic acid molecule forms specific double-stranded hybrids with complementary RNA in which, contrary to the usual α-units, the strands run parallel to each other (Gaultier et al., 1987, Nucleic Acids Res. 15:6625-6641). The antisense nucleic acid molecule can also comprise a 2′-o-methylribonucleotide (Inoue et al., 1987, Nucleic Acids Res. 15:6131-6148) or a chimeric RNA-DNA analogue (Inoue et al., 1987, FEBS Lett. 215:327-330).

[0166] The invention also encompasses ribozymes. Ribozymes are catalytic RNA molecules with ribonuclease activity which are capable of cleaving a single-stranded nucleic acid, such as an mRNA, to which they have a complementary region. Thus, ribozymes (e.g., hammerhead ribozymes as described in Haselhoff and Gerlach, 1988, Nature 334:585-591) can be used to catalytically cleave mRNA transcripts to thereby inhibit translation of the protein encoded by the mRNA. A ribozyme having specificity for a nucleic acid molecule encoding a marker protein can be designed based upon the nucleotide sequence of a cDNA corresponding to the marker. For example, a derivative of a Tetrahymena L-19 IVS RNA can be constructed in which the nucleotide sequence of the active site is complementary to the nucleotide sequence to be cleaved (see Cech et al. U.S. Pat. No. 4,987,071; and Cech et al. U.S. Pat. No. 5,116,742). Alternatively, an mRNA encoding a polypeptide of the invention can be used to select a catalytic RNA having a specific ribonuclease activity from a pool of RNA molecules (see, e.g., Bartel and Szostak, 1993, Science 261:1411-1418).

[0167] The invention also encompasses nucleic acid molecules which form triple helical structures. For example, expression of a marker of the invention can be inhibited by targeting nucleotide sequences complementary to the regulatory region of the gene encoding the marker nucleic acid or protein (e.g., the promoter and/or enhancer) to form triple helical structures that prevent transcription of the gene in target cells. See generally Helene (1991) Anticancer Drug Des. 6(6):569-84; Helene (1992) Ann. N.Y. Acad. Sci. 660:27-36; and Maher (1992) Bioassays 14(12):807-15.

[0168] In various embodiments, the nucleic acid molecules of the invention can be modified at the base moiety, sugar moiety or phosphate backbone to improve, e.g., the stability, hybridization, or solubility of the molecule. For example, the deoxyribose phosphate backbone of the nucleic acids can be modified to generate peptide nucleic acids (see Hyrup et al., 1996, Bioorganic & Medicinal Chemistry 4(1): 5-23). As used herein, the terms “peptide nucleic acids” or “PNAs” refer to nucleic acid mimics, e.g., DNA mimics, in which the deoxyribose phosphate backbone is replaced by a pseudopeptide backbone and only the four natural nucleobases are retained. The neutral backbone of PNAs has been shown to allow for specific hybridization to DNA and RNA under conditions of low ionic strength. The synthesis of PNA oligomers can be performed using standard solid phase peptide synthesis protocols as described in Hyrup et al. (1996), supra; Perry-O'Keefe et al. (1996) Proc. Natl. Acad. Sci. USA 93:14670-675.

[0169] PNAs can be used in therapeutic and diagnostic applications. For example, PNAs can be used as antisense or antigene agents for sequence-specific modulation of gene expression by, e.g., inducing transcription or translation arrest or inhibiting replication. PNAs can also be used, e.g., in the analysis of single base pair mutations in a gene by, e.g., PNA directed PCR clamping; as artificial restriction enzymes when used in combination with other enzymes, e.g., SI nucleases (Hyrup (1996), supra; or as probes or primers for DNA sequence and hybridization (Hyrup, 1996, supra; Perry-O'Keefe et al., 1996, Proc. Natl. Acad. Sci. USA 93:14670-675).

[0170] In another embodiment, PNAs can be modified, e.g., to enhance their stability or cellular uptake, by attaching lipophilic or other helper groups to PNA, by the formation of PNA-DNA chimeras, or by the use of liposomes or other techniques of drug delivery known in the art. For example, PNA-DNA chimeras can be generated which can combine the advantageous properties of PNA and DNA. Such chimeras allow DNA recognition enzymes, e.g., RNase H and DNA polymerases, to interact with the DNA portion while the PNA portion would provide high binding affinity and specificity. PNA-DNA chimeras can be linked using linkers of appropriate lengths selected in terms of base stacking, number of bonds between the nucleobases, and orientation (Hyrup, 1996, supra). The synthesis of PNA-DNA chimeras can be performed as described in Hyrup (1996), supra, and Finn et al. (1996) Nucleic Acids Res. 24(17):3357-63. For example, a DNA chain can be synthesized on a solid support using standard phosphoramidite coupling chemistry and modified nucleoside analogs. Compounds such as 5′-(4-methoxytrityl)amino-5′-deoxy-thymidine phosphoramidite can be used as a link between the PNA and the 5′ end of DNA (Mag et al., 1989, Nucleic Acids Res. 17:5973-88). PNA monomers are then coupled in a step-wise manner to produce a chimeric molecule with a 5′ PNA segment and a 3′ DNA segment (Finn et al., 1996, Nucleic Acids Res. 24(17):3357-63). Alternatively, chimeric molecules can be synthesized with a 5′ DNA segment and a 3′ PNA segment (Peterser et al., 1975, Bioorganic Med. Chem. Lett. 5:1119-11124).

[0171] In other embodiments, the oligonucleotide can include other appended groups such as peptides (e.g., for targeting host cell receptors in vivo), or agents facilitating transport across the cell membrane (see, e.g., Letsinger et al., 1989, Proc. Natl. Acad. Sci. USA 86:6553-6556; Lemaitre et al., 1987, Proc. Natl. Acad. Sci. USA 84:648-652; PCT Publication No. WO 88/09810) or the blood-brain barrier (see, e.g., PCT Publication No. WO 89/10134). In addition, oligonucleotides can be modified with hybridization-triggered cleavage agents (see, e.g., Krol et al., 1988, Bio/Techniques 6:958-976) or intercalating agents (see, e.g., Zon, 1988, Pharm. Res. 5:539-549). To this end, the oligonucleotide can be conjugated to another molecule, e.g., a peptide, hybridization triggered cross-linking agent, transport agent, hybridization-triggered cleavage agent, etc.

[0172] The invention also includes molecular beacon nucleic acids having at least one region which is complementary to a nucleic acid of the invention, such that the molecular beacon is useful for quantitating the presence of the nucleic acid of the invention in a sample. A “molecular beacon” nucleic acid is a nucleic acid comprising a pair of complementary regions and having a fluorophore and a fluorescent quencher associated therewith. The fluorophore and quencher are associated with different portions of the nucleic acid in such an orientation that when the complementary regions are annealed with one another, fluorescence of the fluorophore is quenched by the quencher. When the complementary regions of the nucleic acid are not annealed with one another, fluorescence of the fluorophore is quenched to a lesser degree. Molecular beacon nucleic acids are described, for example, in U.S. Pat. No. 5,876,930.

[0173] II Isolated Proteins and Antibodies

[0174] One aspect of the invention pertains to isolated marker proteins and biologically active portions thereof, as well as polypeptide fragments suitable for use as immunogens to raise antibodies directed against a marker protein or a fragment thereof. In one embodiment, the native marker protein can be isolated from cells or tissue sources by an appropriate purification scheme using standard protein purification techniques. In another embodiment, a protein or peptide comprising the whole or a segment of the marker protein is produced by recombinant DNA techniques. Alternative to recombinant expression, such protein or peptide can be synthesized chemically using standard peptide synthesis techniques.

[0175] An “isolated” or “purified” protein or biologically active portion thereof is substantially free of cellular material or other contaminating proteins from the cell or tissue source from which the protein is derived, or substantially free of chemical precursors or other chemicals when chemically synthesized. The language “substantially free of cellular material” includes preparations of protein in which the protein is separated from cellular components of the cells from which it is isolated or recombinantly produced. Thus, protein that is substantially free of cellular material includes preparations of protein having less than about 30%, 20%, 10%, or 5% (by dry weight) of heterologous protein (also referred to herein as a “contaminating protein”). When the protein or biologically active portion thereof is recombinantly produced, it is also preferably substantially free of culture medium, i.e., culture medium represents less than about 20%, 10%, or 5% of the volume of the protein preparation. When the protein is produced by chemical synthesis, it is preferably substantially free of chemical precursors or other chemicals, i.e., it is separated from chemical precursors or other chemicals which are involved in the synthesis of the protein. Accordingly such preparations of the protein have less than about 30%, 20%, 10%, 5% (by dry weight) of chemical precursors or compounds other than the polypeptide of interest.

[0176] Biologically active portions of a marker protein include polypeptides comprising amino acid sequences sufficiently identical to or derived from the amino acid sequence of the marker protein, which include fewer amino acids than the full length protein, and exhibit at least one activity of the corresponding full-length protein. Typically, biologically active portions comprise a domain or motif with at least one activity of the corresponding full-length protein. A biologically active portion of a marker protein of the invention can be a polypeptide which is, for example, 10, 25, 50, 100 or more amino acids in length. Moreover, other biologically active portions, in which other regions of the marker protein are deleted, can be prepared by recombinant techniques and evaluated for one or more of the functional activities of the native form of the marker protein.

[0177] Preferred marker proteins are encoded by genes corresponding to the markers of the invention listed in Table 1 (e.g., encoded by mRNA comprising a marker nucleic acid). Other useful proteins are substantially identical (e.g., at least about 40%, preferably 50%, 60%, 70%, 80%, 90%, 95%, or 99%) to a marker protein and retain the functional activity of the corresponding naturally-occurring marker protein yet differ in amino acid sequence due to natural allelic variation or mutagenesis.

[0178] To determine the percent identity of two amino acid sequences or of two nucleic acids, the sequences are aligned for optimal comparison purposes (e.g., gaps can be introduced in the sequence of a first amino acid or nucleic acid sequence for optimal alignment with a second amino or nucleic acid sequence). The amino acid residues or nucleotides at corresponding amino acid positions or nucleotide positions are then compared. When a position in the first sequence is occupied by the same amino acid residue or nucleotide as the corresponding position in the second sequence, then the molecules are identical at that position. The percent identity between the two sequences is a function of the number of identical positions shared by the sequences (i.e., % identity=# of identical positions/total # of positions (e.g., overlapping positions)×100). In one embodiment the two sequences are the same length.

[0179] The determination of percent identity between two sequences can be accomplished using a mathematical algorithm. A preferred, non-limiting example of a mathematical algorithm utilized for the comparison of two sequences is the algorithm of Karlin and Altschul (1990) Proc. Natl. Acad. Sci. USA 87:2264-2268, modified as in Karlin and Altschul (1993) Proc. Natl. Acad. Sci. USA 90:5873-5877. Such an algorithm is incorporated into the BLASTN and BLASTX programs of Altschul, et al. (1990) J. Mol. Biol. 215:403-410. BLAST nucleotide searches can be performed with the BLASTN program, score=100, wordlength=12 to obtain nucleotide sequences homologous to a nucleic acid molecules of the invention. BLAST protein searches can be performed with the BLASTP program, score=50, wordlength=3 to obtain amino acid sequences homologous to a protein molecules of the invention. To obtain gapped alignments for comparison purposes, a newer version of the BLAST algorithm called Gapped BLAST can be utilized as described in Altschul et al. (1997) Nucleic Acids Res. 25:3389-3402, which is able to perform gapped local alignments for the programs BLASTN, BLASTP and BLASTX. Alternatively, PSI-Blast can be used to perform an iterated search which detects distant relationships between molecules. When utilizing BLAST, Gapped BLAST, and PSI-Blast programs, the default parameters of the respective programs (e.g., BLASTX and BLASTN) can be used. Another preferred, non-limiting example of a mathematical algorithm utilized for the comparison of sequences is the algorithm of Myers and Miller, (1988) CABIOS 4:11-17. Such an algorithm is incorporated into the ALIGN program (version 2.0) which is part of the GCG sequence alignment software package. When utilizing the ALIGN program for comparing amino acid sequences, a PAM120 weight residue table, a gap length penalty of 12, and a gap penalty of 4 can be used. Yet another useful algorithm for identifying regions of local sequence similarity and alignment is the FASTA algorithm as described in Pearson and Lipman (1988) Proc. Natl. Acad. Sci. USA 85:2444-2448. When using the FASTA algorithm for comparing nucleotide or amino acid sequences, a PAM120 weight residue table can, for example, be used with a k-tuple value of 2.

[0180] The percent identity between two sequences can be determined using techniques similar to those described above, with or without allowing gaps. In calculating percent identity, only exact matches are counted.

[0181] The invention also provides chimeric or fusion proteins comprising a marker protein or a segment thereof. As used herein, a “chimeric protein” or “fusion protein” comprises all or part (preferably a biologically active part) of a marker protein operably linked to a heterologous polypeptide (i.e., a polypeptide other than the marker protein). Within the fusion protein, the term “operably linked” is intended to indicate that the marker protein or segment thereof and the heterologous polypeptide are fused in-frame to each other. The heterologous polypeptide can be fused to the amino-terminus or the carboxyl-terminus of the marker protein or segment.

[0182] One useful fusion protein is a GST fusion protein in which a marker protein or segment is fused to the carboxyl terminus of GST sequences. Such fusion proteins can facilitate the purification of a recombinant polypeptide of the invention.

[0183] In another embodiment, the fusion protein contains a heterologous signal sequence at its amino terminus. For example, the native signal sequence of a marker protein can be removed and replaced with a signal sequence from another protein. For example, the gp67 secretory sequence of the baculovirus envelope protein can be used as a heterologous signal sequence (Ausubel et al., ed., Current Protocols in Molecular Biology, John Wiley & Sons, NY, 1992). Other examples of eukaryotic heterologous signal sequences include the secretory sequences of melittin and human placental alkaline phosphatase (Stratagene; La Jolla, Calif.). In yet another example, useful prokaryotic heterologous signal sequences include the phoA secretory signal (Sambrook et al., supra) and the protein A secretory signal (Pharmacia Biotech; Piscataway, N.J.).

[0184] In yet another embodiment, the fusion protein is an immunoglobulin fusion protein in which all or part of a marker protein is fused to sequences derived from a member of the immunoglobulin protein family. The immunoglobulin fusion proteins of the invention can be incorporated into pharmaceutical compositions and administered to a subject to inhibit an interaction between a ligand (soluble or membrane-bound) and a protein on the surface of a cell (receptor), to thereby suppress signal transduction in vivo. The immunoglobulin fusion protein can be used to affect the bioavailability of a cognate ligand of a marker protein. Inhibition of ligand/receptor interaction can be useful therapeutically, both for treating proliferative and differentiative disorders and for modulating (e.g. promoting or inhibiting) cell survival. Moreover, the immunoglobulin fusion proteins of the invention can be used as immunogens to produce antibodies directed against a marker protein in a subject, to purify ligands and in screening assays to identify molecules which inhibit the interaction of the marker protein with ligands.

[0185] Chimeric and fusion proteins of the invention can be produced by standard recombinant DNA techniques. In another embodiment, the fusion gene can be synthesized by conventional techniques including automated DNA synthesizers. Alternatively, PCR amplification of gene fragments can be carried out using anchor primers which give rise to complementary overhangs between two consecutive gene fragments which can subsequently be annealed and re-amplified to generate a chimeric gene sequence (see, e.g., Ausubel et al., supra). Moreover, many expression vectors are commercially available that already encode a fusion moiety (e.g., a GST polypeptide). A nucleic acid encoding a polypeptide of the invention can be cloned into such an expression vector such that the fusion moiety is linked in-frame to the polypeptide of the invention.

[0186] A signal sequence can be used to facilitate secretion and isolation of marker proteins. Signal sequences are typically characterized by a core of hydrophobic amino acids which are generally cleaved from the mature protein during secretion in one or more cleavage events. Such signal peptides contain processing sites that allow cleavage of the signal sequence from the mature proteins as they pass through the secretory pathway. Thus, the invention pertains to marker proteins, fusion proteins or segments thereof having a signal sequence, as well as to such proteins from which the signal sequence has been proteolytically cleaved (i.e., the cleavage products). In one embodiment, a nucleic acid sequence encoding a signal sequence can be operably linked in an expression vector to a protein of interest, such as a marker protein or a segment thereof. The signal sequence directs secretion of the protein, such as from a eukaryotic host into which the expression vector is transformed, and the signal sequence is subsequently or concurrently cleaved. The protein can then be readily purified from the extracellular medium by art recognized methods. Alternatively, the signal sequence can be linked to the protein of interest using a sequence which facilitates purification, such as with a GST domain.

[0187] The present invention also pertains to variants of the marker proteins. Such variants have an altered amino acid sequence which can function as either agonists (mimetics) or as antagonists. Variants can be generated by mutagenesis, e.g., discrete point mutation or truncation. An agonist can retain substantially the same, or a subset, of the biological activities of the naturally occurring form of the protein. An antagonist of a protein can inhibit one or more of the activities of the naturally occurring form of the protein by, for example, competitively binding to a downstream or upstream member of a cellular signaling cascade which includes the protein of interest. Thus, specific biological effects can be elicited by treatment with a variant of limited function. Treatment of a subject with a variant having a subset of the biological activities of the naturally occurring form of the protein can have fewer side effects in a subject relative to treatment with the naturally occurring form of the protein.

[0188] Variants of a marker protein which function as either agonists (mimetics) or as antagonists can be identified by screening combinatorial libraries of mutants, e.g., truncation mutants, of the protein of the invention for agonist or antagonist activity. In one embodiment, a variegated library of variants is generated by combinatorial mutagenesis at the nucleic acid level and is encoded by a variegated gene library. A variegated library of variants can be produced by, for example, enzymatically ligating a mixture of synthetic oligonucleotides into gene sequences such that a degenerate set of potential protein sequences is expressible as individual polypeptides, or alternatively, as a set of larger fusion proteins (e.g., for phage display). There are a variety of methods which can be used to produce libraries of potential variants of the marker proteins from a degenerate oligonucleotide sequence. Methods for synthesizing degenerate oligonucleotides are known in the art (see, e.g., Narang, 1983, Tetrahedron 39:3; Itakura et al., 1984, Annu. Rev. Biochem. 53:323; Itakura et al., 1984, Science 198:1056; Ike et al., 1983 Nucleic Acid Res. 11:477).

[0189] In addition, libraries of segments of a marker protein can be used to generate a variegated population of polypeptides for screening and subsequent selection of variant marker proteins or segments thereof. For example, a library of coding sequence fragments can be generated by treating a double stranded PCR fragment of the coding sequence of interest with a nuclease under conditions wherein nicking occurs only about once per molecule, denaturing the double stranded DNA, renaturing the DNA to form double stranded DNA which can include sense/antisense pairs from different nicked products, removing single stranded portions from reformed duplexes by treatment with S1 nuclease, and ligating the resulting fragment library into an expression vector. By this method, an expression library can be derived which encodes amino terminal and internal fragments of various sizes of the protein of interest.

[0190] Several techniques are known in the art for screening gene products of combinatorial libraries made by point mutations or truncation, and for screening cDNA libraries for gene products having a selected property. The most widely used techniques, which are amenable to high through-put analysis, for screening large gene libraries typically include cloning the gene library into replicable expression vectors, transforming appropriate cells with the resulting library of vectors, and expressing the combinatorial genes under conditions in which detection of a desired activity facilitates isolation of the vector encoding the gene whose product was detected. Recursive ensemble mutagenesis (REM), a technique which enhances the frequency of functional mutants in the libraries, can be used in combination with the screening assays to identify variants of a protein of the invention (Arkin and Yourvan, 1992, Proc. Natl. Acad. Sci. USA 89:7811-7815; Delgrave et al., 1993, Protein Engineering 6(3):327-331).

[0191] Another aspect of the invention pertains to antibodies directed against a protein of the invention. In preferred embodiments, the antibodies specifically bind a marker protein or a fragment thereof. The terms “antibody” and “antibodies” as used interchangeably herein refer to immunoglobulin molecules as well as fragments and derivatives thereof that comprise an immunologically active portion of an immunoglobulin molecule, (i.e., such a portion contains an antigen binding site which specifically binds an antigen, such as a marker protein, e.g., an epitope of a marker protein). An antibody which specifically binds to a protein of the invention is an antibody which binds the protein, but does not substantially bind other molecules in a sample, e.g., a biological sample, which naturally contains the protein. Examples of an immunologically active portion of an immunoglobulin molecule include, but are not limited to, single-chain antibodies (scAb), F(ab) and F(ab′)₂ fragments.

[0192] An isolated protein of the invention or a fragment thereof can be used as an immunogen to generate antibodies. The full-length protein can be used or, alternatively, the invention provides antigenic peptide fragments for use as immunogens. The antigenic peptide of a protein of the invention comprises at least 8 (preferably 10, 15, 20, or 30 or more) amino acid residues of the amino acid sequence of one of the proteins of the invention, and encompasses at least one epitope of the protein such that an antibody raised against the peptide forms a specific immune complex with the protein. Preferred epitopes encompassed by the antigenic peptide are regions that are located on the surface of the protein, e.g., hydrophilic regions. Hydrophobicity sequence analysis, hydrophilicity sequence analysis, or similar analyses can be used to identify hydrophilic regions. In preferred embodiments, an isolated marker protein or fragment thereof is used as an immunogen.

[0193] An immunogen typically is used to prepare antibodies by immunizing a suitable (i.e. immunocompetent) subject such as a rabbit, goat, mouse, or other mammal or vertebrate. An appropriate immunogenic preparation can contain, for example, recombinantly-expressed or chemically-synthesized protein or peptide. The preparation can further include an adjuvant, such as Freund's complete or incomplete adjuvant, or a similar immunostimulatory agent. Preferred immunogen compositions are those that contain no other human proteins such as, for example, immunogen compositions made using a non-human host cell for recombinant expression of a protein of the invention. In such a manner, the resulting antibody compositions have reduced or no binding of human proteins other than a protein of the invention.

[0194] The invention provides polyclonal and monoclonal antibodies. The term “monoclonal antibody” or “monoclonal antibody composition”, as used herein, refers to a population of antibody molecules that contain only one species of an antigen binding site capable of immunoreacting with a particular epitope. Preferred polyclonal and monoclonal antibody compositions are ones that have been selected for antibodies directed against a protein of the invention. Particularly preferred polyclonal and monoclonal antibody preparations are ones that contain only antibodies directed against a marker protein or fragment thereof.

[0195] Polyclonal antibodies can be prepared by immunizing a suitable subject with a protein of the invention as an immunogen The antibody titer in the immunized subject can be monitored over time by standard techniques, such as with an enzyme linked immunosorbent assay (ELISA) using immobilized polypeptide. At an appropriate time after immunization, e.g., when the specific antibody titers are highest, antibody-producing cells can be obtained from the subject and used to prepare monoclonal antibodies (mAb) by standard techniques, such as the hybridoma technique originally described by Kohler and Milstein (1975) Nature 256:495-497, 497, the human B cell hybridoma technique (see Kozbor et al., 1983, Immunol. Today 4:72), the EBV-hybridoma technique (see Cole et al., pp. 77-96 In Monoclonal Antibodies and Cancer Therapy, Alan R. Liss, Inc., 1985) or trioma techniques. The technology for producing hybridomas is well known (see generally Current Protocols in Immunology, Coligan et al. ed., John Wiley & Sons, New York, 1994). Hybridoma cells producing a monoclonal antibody of the invention are detected by screening the hybridoma culture supernatants for antibodies that bind the polypeptide of interest, e.g., using a standard ELISA assay.

[0196] Alternative to preparing monoclonal antibody-secreting hybridomas, a monoclonal antibody directed against a protein of the invention can be identified and isolated by screening a recombinant combinatorial immunoglobulin library (e.g., an antibody phage display library) with the polypeptide of interest. Kits for generating and screening phage display libraries are commercially available (e.g., the Pharmacia Recombinant Phage Antibody System, Catalog No. 27-9400-01; and the Stratagene SurfZAP Phage Display Kit, Catalog No. 240612). Additionally, examples of methods and reagents particularly amenable for use in generating and screening antibody display library can be found in, for example, U.S. Pat. No. 5,223,409; PCT Publication No. WO 92/18619; PCT Publication No. WO 91/17271; PCT Publication No. WO 92/20791; PCT Publication No. WO 92/15679; PCT Publication No. WO 93/01288; PCT Publication No. WO 92/01047; PCT Publication No. WO 92/09690; PCT Publication No. WO 90/02809; Fuchs et al. (1991) Bio/Technology 9:1370-1372; Hay et al. (1992) Hum. Antibod. Hybridomas 3:81-85; Huse et al. (1989) Science 246:1275-1281; Griffiths et al. (1993) EMBO J. 12:725-734.

[0197] The invention also provides recombinant antibodies that specifically bind a protein of the invention. In preferred embodiments, the recombinant antibodies specifically binds a marker protein or fragment thereof. Recombinant antibodies include, but are not limited to, chimeric and humanized monoclonal antibodies, comprising both human and non-human portions, single-chain antibodies and multi-specific antibodies. A chimeric antibody is a molecule in which different portions are derived from different animal species, such as those having a variable region derived from a murine mAb and a human immunoglobulin constant region. (See, e.g., Cabilly et al., U.S. Pat. No. 4,816,567; and Boss et al., U.S. Pat. No. 4,816,397, which are incorporated herein by reference in their entirety.) Single-chain antibodies have an antigen binding site and consist of a single polypeptide. They can be produced by techniques known in the art, for example using methods described in Ladner et. al U.S. Pat. No. 4,946,778 (which is incorporated herein by reference in its entirety); Bird et al., (1988) Science 242:423-426; Whitlow et al., (1991) Methods in Enzymology 2:1-9; Whitlow et al., (1991) Methods in Enzymology 2:97-105; and Huston et al., (1991) Methods in Enzymology Molecular Design and Modeling: Concepts and Applications 203:46-88. Multi-specific antibodies are antibody molecules having at least two antigen-binding sites that specifically bind different antigens. Such molecules can be produced by techniques known in the art, for example using methods described in Segal, U.S. Pat. No. 4,676,980 (the disclosure of which is incorporated herein by reference in its entirety); Holliger et al., (1993) Proc. Natl. Acad. Sci. USA 90:6444-6448; Whitlow et al., (1994) Protein Eng. 7:1017-1026 and U.S. Pat. No. 6,121,424.

[0198] Humanized antibodies are antibody molecules from non-human species having one or more complementarity determining regions (CDRs) from the non-human species and a framework region from a human immunoglobulin molecule. (See, e.g., Queen, U.S. Pat. No. 5,585,089, which is incorporated herein by reference in its entirety.) Humanized monoclonal antibodies can be produced by recombinant DNA techniques known in the art, for example using methods described in PCT Publication No. WO 87/02671; European Patent Application 184,187; European Patent Application 171,496; European Patent Application 173,494; PCT Publication No. WO 86/01533; U.S. Pat. No. 4,816,567; European Patent Application 125,023; Better et al. (1988) Science 240:1041-1043; Liu et al. (1987) Proc. Natl. Acad. Sci. USA 84:3439-3443; Liu et al. (1987) J. Immunol. 139:3521-3526; Sun et al. (1987) Proc. Natl. Acad. Sci. USA 84:214-218; Nishimura et al. (1987) Cancer Res. 47:999-1005; Wood et al. (1985) Nature 314:446-449; and Shaw et al. (1988) J. Natl. Cancer Inst. 80:1553-1559); Morrison (1985) Science 229:1202-1207; Oi et al. (1986) Bio/Techniques 4:214; U.S. Pat. No. 5,225,539; Jones et al. (1986) Nature 321:552-525; Verhoeyan et al. (1988) Science 239:1534; and Beidler et al. (1988) J. Immunol. 141:4053-4060.

[0199] More particularly, humanized antibodies can be produced, for example, using transgenic mice which are incapable of expressing endogenous immunoglobulin heavy and light chains genes, but which can express human heavy and light chain genes. The transgenic mice are immunized in the normal fashion with a selected antigen, e.g., all or a portion of a polypeptide corresponding to a marker of the invention. Monoclonal antibodies directed against the antigen can be obtained using conventional hybridoma technology. The human immunoglobulin transgenes harbored by the transgenic mice rearrange during B cell differentiation, and subsequently undergo class switching and somatic mutation. Thus, using such a technique, it is possible to produce therapeutically useful IgG, IgA and IgE antibodies. For an overview of this technology for producing human antibodies, see Lonberg and Huszar (1995) Int. Rev. Immunol. 13:65-93). For a detailed discussion of this technology for producing human antibodies and human monoclonal antibodies and protocols for producing such antibodies, see, e.g., U.S. Pat. Nos. 5,625,126; 5,633,425; 5,569,825; 5,661,016; and 5,545,806. In addition, companies such as Abgenix, Inc. (Freemont, Calif.), can be engaged to provide human antibodies directed against a selected antigen using technology similar to that described above.

[0200] Completely human antibodies which recognize a selected epitope can be generated using a technique referred to as “guided selection.” In this approach a selected non-human monoclonal antibody, e.g., a murine antibody, is used to guide the selection of a completely human antibody recognizing the same epitope (Jespers et al., 1994, Bio/Technology 12:899-903).

[0201] The antibodies of the invention can be isolated after production (e.g., from the blood or serum of the subject) or synthesis and further purified by well-known techniques. For example, IgG antibodies can be purified using protein A chromatography. Antibodies specific for a protein of the invention can be selected or (e.g., partially purified) or purified by, e.g., affinity chromatography. For example, a recombinantly expressed and purified (or partially purified) protein of the invention is produced as described herein, and covalently or non-covalently coupled to a solid support such as, for example, a chromatography column. The column can then be used to affinity purify antibodies specific for the proteins of the invention from a sample containing antibodies directed against a large number of different epitopes, thereby generating a substantially purified antibody composition, i.e., one that is substantially free of contaminating antibodies. By a substantially purified antibody composition is meant, in this context, that the antibody sample contains at most only 30% (by dry weight) of contaminating antibodies directed against epitopes other than those of the desired protein of the invention, and preferably at most 20%, yet more preferably at most 10%, and most preferably at most 5% (by dry weight) of the sample is contaminating antibodies. A purified antibody composition means that at least 99% of the antibodies in the composition are directed against the desired protein of the invention.

[0202] In a preferred embodiment, the substantially purified antibodies of the invention may specifically bind to a signal peptide, a secreted sequence, an extracellular domain, a transmembrane or a cytoplasmic domain or cytoplasmic membrane of a protein of the invention. In a particularly preferred embodiment, the substantially purified antibodies of the invention specifically bind to a secreted sequence or an extracellular domain of the amino acid sequences of a protein of the invention. In a more preferred embodiment, the substantially purified antibodies of the invention specifically bind to a secreted sequence or an extracellular domain of the amino acid sequences of a marker protein.

[0203] An antibody directed against a protein of the invention can be used to isolate the protein by standard techniques, such as affinity chromatography or immunoprecipitation. Moreover, such an antibody can be used to detect the marker protein or fragment thereof (e.g., in a cellular lysate or cell supernatant) in order to evaluate the level and pattern of expression of the marker. The antibodies can also be used diagnostically to monitor protein levels in tissues or body fluids (e.g. in an colorectal-associated body fluid) as part of a clinical testing procedure, e.g., to, for example, determine the efficacy of a given treatment regimen. Detection can be facilitated by the use of an antibody derivative, which comprises an antibody of the invention coupled to a detectable substance. Examples of detectable substances include various enzymes, prosthetic groups, fluorescent materials, luminescent materials, bioluminescent materials, and radioactive materials. Examples of suitable enzymes include horseradish peroxidase, alkaline phosphatase, β-galactosidase, or acetylcholinesterase; examples of suitable prosthetic group complexes include streptavidin/biotin and avidin/biotin; examples of suitable fluorescent materials include umbelliferone, fluorescein, fluorescein isothiocyanate, rhodamine, dichlorotriazinylamine fluorescein, dansyl chloride or phycoerythrin; an example of a luminescent material includes luminol; examples of bioluminescent materials include luciferase, luciferin, and aequorin, and examples of suitable radioactive material include ¹²⁵I, ¹³¹I, ³⁵S or ³H.

[0204] Antibodies of the invention may also be used as therapeutic agents in treating cancers. In a preferred embodiment, completely human antibodies of the invention are used for therapeutic treatment of human cancer patients, particularly those having an colon cancer. In another preferred embodiment, antibodies that bind specifically to a marker protein or fragment thereof are used for therapeutic treatment. Further, such therapeutic antibody may be an antibody derivative or immunotoxin comprising an antibody conjugated to a therapeutic moiety such as a cytotoxin, a therapeutic agent or a radioactive metal ion. A cytotoxin or cytotoxic agent includes any agent that is detrimental to cells. Examples include taxol, cytochalasin B, gramicidin D, ethidium bromide, emetine, mitomycin, etoposide, tenoposide, vincristine, vinblastine, coichicin, doxorubicin, daunorubicin, dihydroxy anthracin dione, mitoxantrone, mithramycin, actinomycin D, 1-dehydrotestosterone, glucocorticoids, procaine, tetracaine, lidocaine, propranolol, and puromycin and analogs or homologs thereof. Therapeutic agents include, but are not limited to, antimetabolites (e.g., methotrexate, 6-mercaptopurine, 6-thioguanine, cytarabine, 5-fluorouracil decarbazine), alkylating agents (e.g., mechlorethamine, thioepa chlorambucil, melphalan, carmustine (BSNU) and lomustine (CCNU), cyclothosphamide, busulfan, dibromomannitol, streptozotocin, mitomycin C, and cis-dichlorodiamine platinum (II) (DDP) cisplatin), anthracyclines (e.g., daunorubicin (formerly daunomycin) and doxorubicin), antibiotics (e.g., dactinomycin (formerly actinomycin), bleomycin, mithramycin, and anthramycin (AMC)), and anti-mitotic agents (e.g., vincristine and vinblastine).

[0205] The conjugated antibodies of the invention can be used for modifying a given biological response, for the drug moiety is not to be construed as limited to classical chemical therapeutic agents. For example, the drug moiety may be a protein or polypeptide possessing a desired biological activity. Such proteins may include, for example, a toxin such as ribosome-inhibiting protein (see Better et al., U.S. Pat. No. 6,146,631, the disclosure of which is incorporated herein in its entirety), abrin, ricin A, pseudomonas exotoxin, or diphtheria toxin; a protein such as tumor necrosis factor, .alpha.-interferon, .beta.-interferon, nerve growth factor, platelet derived growth factor, tissue plasminogen activator; or, biological response modifiers such as, for example, lymphokines, interleukin-1 (“IL-1”), interleukin-2 (“IL-2”), interleukin-6 (“IL-6”), granulocyte macrophase colony stimulating factor (“GM-CSF”), granulocyte colony stimulating factor (“G-CSF”), or other growth factors.

[0206] Techniques for conjugating such therapeutic moiety to antibodies are well known, see, e.g., Arnon et al., “Monoclonal Antibodies For Immunotargeting Of Drugs In Cancer Therapy”, in Monoclonal Antibodies And Cancer Therapy, Reisfeld et al. (eds.), pp. 243-56 (Alan R. Liss, Inc. 1985); Hellstrom et al., “Antibodies For Drug Delivery”, in Controlled Drug Delivery (2nd Ed.), Robinson et al. (eds.), pp. 623-53 (Marcel Dekker, Inc. 1987); Thorpe, “Antibody Carriers Of Cytotoxic Agents In Cancer Therapy: A Review”, in Monoclonal Antibodies '84: Biological And Clinical Applications, Pinchera et al. (eds.), pp. 475-506 (1985); “Analysis, Results, And Future Prospective Of The Therapeutic Use Of Radiolabeled Antibody In Cancer Therapy”, in Monoclonal Antibodies For Cancer Detection And Therapy, Baldwin et al. (eds.), pp. 303-16 (Academic Press 1985), and Thorpe et al., “The Preparation And Cytotoxic Properties Of Antibody-Toxin Conjugates”, Immunol. Rev., 62:119-58 (1982).

[0207] Accordingly, in one aspect, the invention provides substantially purified antibodies, antibody fragments and derivatives, all of which specifically bind to a protein of the invention and preferably, a marker protein. In various embodiments, the substantially purified antibodies of the invention, or fragments or derivatives thereof, can be human, non-human, chimeric and/or humanized antibodies. In another aspect, the invention provides non-human antibodies, antibody fragments and derivatives, all of which specifically bind to a protein of the invention and preferably, a marker protein. Such non-human antibodies can be goat, mouse, sheep, horse, chicken, rabbit, or rat antibodies. Alternatively, the non-human antibodies of the invention can be chimeric and/or humanized antibodies. In addition, the non-human antibodies of the invention can be polyclonal antibodies or monoclonal antibodies. In still a further aspect, the invention provides monoclonal antibodies, antibody fragments and derivatives, all of which specifically bind to a protein of the invention and preferably, a marker protein. The monoclonal antibodies can be human, humanized, chimeric and/or non-human antibodies.

[0208] The invention also provides a kit containing an antibody of the invention conjugated to a detectable substance, and instructions for use. Still another aspect of the invention is a pharmaceutical composition comprising an antibody of the invention and a pharmaceutically acceptable carrier. In one embodiment, the pharmaceutical composition contains an antibody of the invention and a pharmaceutically acceptable carrier.

[0209] III. Recombinant Expression Vectors and Host Cells

[0210] Another aspect of the invention pertains to vectors, preferably expression vectors, containing a nucleic acid encoding a marker protein (or a portion of such a protein). As used herein, the term “vector” refers to a nucleic acid molecule capable of transporting another nucleic acid to which it has been linked. One type of vector is a “plasmid”, which refers to a circular double stranded DNA loop into which additional DNA segments can be ligated. Another type of vector is a viral vector, wherein additional DNA segments can be ligated into the viral genome. Certain vectors are capable of autonomous replication in a host cell into which they are introduced (e.g., bacterial vectors having a bacterial origin of replication and episomal mammalian vectors). Other vectors (e.g., non-episomal mammalian vectors) are integrated into the genome of a host cell upon introduction into the host cell, and thereby are replicated along with the host genome. Moreover, certain vectors, namely expression vectors, are capable of directing the expression of genes to which they are operably linked. In general, expression vectors of utility in recombinant DNA techniques are often in the form of plasmids (vectors). However, the invention is intended to include such other forms of expression vectors, such as viral vectors (e.g., replication defective retroviruses, adenoviruses and adeno-associated viruses), which serve equivalent functions.

[0211] The recombinant expression vectors of the invention comprise a nucleic acid of the invention in a form suitable for expression of the nucleic acid in a host cell. This means that the recombinant expression vectors include one or more regulatory sequences, selected on the basis of the host cells to be used for expression, which is operably linked to the nucleic acid sequence to be expressed. Within a recombinant expression vector, “operably linked” is intended to mean that the nucleotide sequence of interest is linked to the regulatory sequence(s) in a manner which allows for expression of the nucleotide sequence (e.g., in an in vitro transcription/translation system or in a host cell when the vector is introduced into the host cell). The term “regulatory sequence” is intended to include promoters, enhancers and other expression control elements (e.g., polyadenylation signals). Such regulatory sequences are described, for example, in Goeddel, Methods in Enzymology: Gene Expression Technology vol.185, Academic Press, San Diego, Calif. (1991). Regulatory sequences include those which direct constitutive expression of a nucleotide sequence in many types of host cell and those which direct expression of the nucleotide sequence only in certain host cells (e.g., tissue-specific regulatory sequences). It will be appreciated by those skilled in the art that the design of the expression vector can depend on such factors as the choice of the host cell to be transformed, the level of expression of protein desired, and the like. The expression vectors of the invention can be introduced into host cells to thereby produce proteins or peptides, including fusion proteins or peptides, encoded by nucleic acids as described herein.

[0212] The recombinant expression vectors of the invention can be designed for expression of a marker protein or a segment thereof in prokaryotic (e.g., E. coli) or eukaryotic cells (e.g., insect cells {using baculovirus expression vectors }, yeast cells or mammalian cells). Suitable host cells are discussed further in Goeddel, supra. Alternatively, the recombinant expression vector can be transcribed and translated in vitro, for example using T7 promoter regulatory sequences and T7 polymerase.

[0213] Expression of proteins in prokaryotes is most often carried out in E. coli with vectors containing constitutive or inducible promoters directing the expression of either fusion or non-fusion proteins. Fusion vectors add a number of amino acids to a protein encoded therein, usually to the amino terminus of the recombinant protein. Such fusion vectors typically serve three purposes: 1) to increase expression of recombinant protein; 2) to increase the solubility of the recombinant protein; and 3) to aid in the purification of the recombinant protein by acting as a ligand in affinity purification. Often, in fusion expression vectors, a proteolytic cleavage site is introduced at the junction of the fusion moiety and the recombinant protein to enable separation of the recombinant protein from the fusion moiety subsequent to purification of the fusion protein. Such enzymes, and their cognate recognition sequences, include Factor Xa, thrombin and enterokinase. Typical fusion expression vectors include pGEX (Pharmacia Biotech Inc; Smith and Johnson, 1988, Gene 67:31-40), pMAL (New England Biolabs, Beverly, Mass.) and pRIT5 (Pharmacia, Piscataway, N.J.) which fuse glutathione S-transferase (GST), maltose E binding protein, or protein A, respectively, to the target recombinant protein.

[0214] Examples of suitable inducible non-fusion E. coli expression vectors include pTrc (Amann et al., 1988, Gene 69:301-315) and pET 11d (Studier et al., p. 60-89, In Gene Expression Technology: Methods in Enzymology vol.185, Academic Press, San Diego, Calif., 1991). Target gene expression from the pTrc vector relies on host RNA polymerase transcription from a hybrid trp-lac fusion promoter. Target gene expression from the pET 11d vector relies on transcription from a T7 gn10-lac fusion promoter mediated by a co-expressed viral RNA polymerase (T7 gn1). This viral polymerase is supplied by host strains BL21(DE3) or HMS174(DE3) from a resident prophage harboring a T7 gn1 gene under the transcriptional control of the lacUV 5 promoter.

[0215] One strategy to maximize recombinant protein expression in E. coli is to express the protein in a host bacteria with an impaired capacity to proteolytically cleave the recombinant protein (Gottesman, p. 119-128, In Gene Expression Technology: Methods in Enzymology vol. 185, Academic Press, San Diego, Calif., 1990. Another strategy is to alter the nucleic acid sequence of the nucleic acid to be inserted into an expression vector so that the individual codons for each amino acid are those preferentially utilized in E. coli (Wada et al., 1992, Nucleic Acids Res. 20:2111-2118). Such alteration of nucleic acid sequences of the invention can be carried out by standard DNA synthesis techniques.

[0216] In another embodiment, the expression vector is a yeast expression vector. Examples of vectors for expression in yeast S. cerevisiae include pYepSec 1 (Baldari et al., 1987, EMBO J. 6:229-234), pMFa (Kurjan and Herskowitz, 1982, Cell 30:933-943), pJRY88 (Schultz et al., 1987, Gene 54:113-123), pYES2 (Invitrogen Corporation, San Diego, Calif.), and pPicZ (Invitrogen Corp, San Diego, Calif.).

[0217] Alternatively, the expression vector is a baculovirus expression vector. Baculovirus vectors available for expression of proteins in cultured insect cells (e.g., Sf 9 cells) include the pAc series (Smith et al., 1983, Mol. Cell Biol. 3:2156-2165) and the pVL series (Lucklow and Summers, 1989, Virology 170:31-39).

[0218] In yet another embodiment, a nucleic acid of the invention is expressed in mammalian cells using a mammalian expression vector. Examples of mammalian expression vectors include pCDM8 (Seed, 1987, Nature 329:840) and pMT2PC (Kaufman et al., 1987, EMBO J. 6:187-195). When used in mammalian cells, the expression vector's control functions are often provided by viral regulatory elements. For example, commonly used promoters are derived from polyoma, Adenovirus 2, cytomegalovirus and Simian Virus 40. For other suitable expression systems for both prokaryotic and eukaryotic cells see chapters 16 and 17 of Sambrook et al., supra.

[0219] In another embodiment, the recombinant mammalian expression vector is capable of directing expression of the nucleic acid preferentially in a particular cell type (e.g., tissue-specific regulatory elements are used to express the nucleic acid). Tissue-specific regulatory elements are known in the art. Non-limiting examples of suitable tissue-specific promoters include the albumin promoter (Pinkert et al., 1987, Genes Dev. 1:268-277), lymphoid-specific promoters (Calame and Eaton, 1988, Adv. Immunol. 43:235-275), in particular promoters of T cell receptors (Winoto and Baltimore, 1989, EMBO J. 8:729-733) and immunoglobulins (Banerji et al., 1983, Cell 33:729-740; Queen and Baltimore, 1983, Cell 33:741-748), neuron-specific promoters (e.g., the neurofilament promoter; Byrne and Ruddle, 1989, Proc. Natl. Acad. Sci. USA 86:5473-5477), pancreas-specific promoters (Edlund et al., 1985, Science 230:912-916), and mammary gland-specific promoters (e.g., milk whey promoter; U.S. Pat. No. 4,873,316 and European Application Publication No. 264,166). Developmentally-regulated promoters are also encompassed, for example the murine hox promoters (Kessel and Gruss, 1990, Science 249:374-379) and the α-fetoprotein promoter (Camper and Tilghman, 1989, Genes Dev. 3:537-546).

[0220] The invention further provides a recombinant expression vector comprising a DNA molecule of the invention cloned into the expression vector in an antisense orientation. That is, the DNA molecule is operably linked to a regulatory sequence in a manner which allows for expression (by transcription of the DNA molecule) of an RNA molecule which is antisense to the mRNA encoding a polypeptide of the invention. Regulatory sequences operably linked to a nucleic acid cloned in the antisense orientation can be chosen which direct the continuous expression of the antisense RNA molecule in a variety of cell types, for instance viral promoters and/or enhancers, or regulatory sequences can be chosen which direct constitutive, tissue-specific or cell type specific expression of antisense RNA. The antisense expression vector can be in the form of a recombinant plasmid, phagemid, or attenuated virus in which antisense nucleic acids are produced under the control of a high efficiency regulatory region, the activity of which can be determined by the cell type into which the vector is introduced. For a discussion of the regulation of gene expression using antisense genes see Weintraub et al., 1986, Trends in Genetics, Vol. 1(1).

[0221] Another aspect of the invention pertains to host cells into which a recombinant expression vector of the invention has been introduced. The terms “host cell” and “recombinant host cell” are used interchangeably herein. It is understood that such terms refer not only to the particular subject cell but to the progeny or potential progeny of such a cell. Because certain modifications may occur in succeeding generations due to either mutation or environmental influences, such progeny may not, in fact, be identical to the parent cell, but are still included within the scope of the term as used herein.

[0222] A host cell can be any prokaryotic (e.g., E. coli) or eukaryotic cell (e.g., insect cells, yeast or mammalian cells).

[0223] Vector DNA can be introduced into prokaryotic or eukaryotic cells via conventional transformation or transfection techniques. As used herein, the terms “transformation” and “transfection” are intended to refer to a variety of art-recognized techniques for introducing foreign nucleic acid into a host cell, including calcium phosphate or calcium chloride co-precipitation, DEAE-dextran-mediated transfection, lipofection, or electroporation. Suitable methods for transforming or transfecting host cells can be found in Sambrook, et al. (supra), and other laboratory manuals.

[0224] For stable transfection of mammalian cells, it is known that, depending upon the expression vector and transfection technique used, only a small fraction of cells may integrate the foreign DNA into their genome. In order to identify and select these integrants, a gene that encodes a selectable marker (e.g., for resistance to antibiotics) is generally introduced into the host cells along with the gene of interest. Preferred selectable markers include those which confer resistance to drugs, such as G418, hygromycin and methotrexate. Cells stably transfected with the introduced nucleic acid can be identified by drug selection (e.g., cells that have incorporated the selectable marker will survive, while the other cells die).

[0225] A host cell of the invention, such as a prokaryotic or eukaryotic host cell in culture, can be used to produce a marker protein or a segment thereof. Accordingly, the invention further provides methods for producing a marker protein or a segment thereof using the host cells of the invention. In one embodiment, the method comprises culturing the host cell of the invention (into which a recombinant expression vector encoding a marker protein or a segment thereof has been introduced) in a suitable medium such that the is produced. In another embodiment, the method further comprises isolating the a marker protein or a segment thereof from the medium or the host cell.

[0226] The host cells of the invention can also be used to produce nonhuman transgenic animals. For example, in one embodiment, a host cell of the invention is a fertilized oocyte or an embryonic stem cell into which a sequences encoding a marker protein or a segment thereof have been introduced. Such host cells can then be used to create non-human transgenic animals in which exogenous sequences encoding a marker protein of the invention have been introduced into their genome or homologous recombinant animals in which endogenous gene(s) encoding a marker protein have been altered. Such animals are useful for studying the function and/or activity of the marker protein and for identifying and/or evaluating modulators of marker protein. As used herein, a “transgenic animal” is a non-human animal, preferably a mammal, more preferably a rodent such as a rat or mouse, in which one or more of the cells of the animal includes a transgene. Other examples of transgenic animals include non-human primates, sheep, dogs, cows, goats, chickens, amphibians, etc. A transgene is exogenous DNA which is integrated into the genome of a cell from which a transgenic animal develops and which remains in the genome of the mature animal, thereby directing the expression of an encoded gene product in one or more cell types or tissues of the transgenic animal. As used herein, an “homologous recombinant animal” is a non-human animal, preferably a mammal, more preferably a mouse, in which an endogenous gene has been altered by homologous recombination between the endogenous gene and an exogenous DNA molecule introduced into a cell of the animal, e.g., an embryonic cell of the animal, prior to development of the animal.

[0227] A transgenic animal of the invention can be created by introducing a nucleic acid encoding a marker protein into the male pronuclei of a fertilized oocyte, e.g., by microinjection, retroviral infection, and allowing the oocyte to develop in a pseudopregnant female foster animal. Intronic sequences and polyadenylation signals can also be included in the transgene to increase the efficiency of expression of the transgene. A tissue-specific regulatory sequence(s) can be operably linked to the transgene to direct expression of the polypeptide of the invention to particular cells. Methods for generating transgenic animals via embryo manipulation and microinjection, particularly animals such as mice, have become conventional in the art and are described, for example, in U.S. Pat. Nos. 4,736,866 and 4,870,009, 4,873,191 and in Hogan, Manipulating the Mouse Embryo, Cold Spring Harbor Laboratory Press, Cold Spring Harbor, N.Y., 1986. Similar methods are used for production of other transgenic animals. A transgenic founder animal can be identified based upon the presence of the transgene in its genome and/or expression of mRNA encoding the transgene in tissues or cells of the animals. A transgenic founder animal can then be used to breed additional animals carrying the transgene. Moreover, transgenic animals carrying the transgene can further be bred to other transgenic animals carrying other transgenes.

[0228] To create an homologous recombinant animal, a vector is prepared which contains at least a portion of a gene encoding a marker protein into which a deletion, addition or substitution has been introduced to thereby alter, e.g., functionally disrupt, the gene. In a preferred embodiment, the vector is designed such that, upon homologous recombination, the endogenous gene is functionally disrupted (i.e., no longer encodes a functional protein; also referred to as a “knock out” vector). Alternatively, the vector can be designed such that, upon homologous recombination, the endogenous gene is mutated or otherwise altered but still encodes functional protein (e.g., the upstream regulatory region can be altered to thereby alter the expression of the endogenous protein). In the homologous recombination vector, the altered portion of the gene is flanked at its 5′ and 3′ ends by additional nucleic acid of the gene to allow for homologous recombination to occur between the exogenous gene carried by the vector and an endogenous gene in an embryonic stem cell. The additional flanking nucleic acid sequences are of sufficient length for successful homologous recombination with the endogenous gene. Typically, several kilobases of flanking DNA (both at the 5′ and 3′ ends) are included in the vector (see, e.g., Thomas and Capecchi, 1987, Cell 51:503 for a description of homologous recombination vectors). The vector is introduced into an embryonic stem cell line (e.g., by electroporation) and cells in which the introduced gene has homologously recombined with the endogenous gene are selected (see, e.g., Li et al., 1992, Cell 69:915). The selected cells are then injected into a blastocyst of an animal (e.g., a mouse) to form aggregation chimeras (see, e.g., Bradley, Teratocarcinomas and Embryonic Stem Cells: A Practical Approach, Robertson, Ed., IRL, Oxford, 1987, pp. 113-152). A chimeric embryo can then be implanted into a suitable pseudopregnant female foster animal and the embryo brought to term. Progeny harboring the homologously recombined DNA in their germ cells can be used to breed animals in which all cells of the animal contain the homologously recombined DNA by germline transmission of the transgene. Methods for constructing homologous recombination vectors and homologous recombinant animals are described further in Bradley (1991) Current Opinion in Bio/Technology 2:823-829 and in PCT Publication NOS. WO 90/11354, WO 91/01140, WO 92/0968, and WO 93/04169.

[0229] In another embodiment, transgenic non-human animals can be produced which contain selected systems which allow for regulated expression of the transgene. One example of such a system is the cre/loxP recombinase system of bacteriophage P1. For a description of the cre/loxP recombinase system, see, e.g., Lakso et al. (1992) Proc. Natl. Acad. Sci. USA 89:6232-6236. Another example of a recombinase system is the FLP recombinase system of Saccharomyces cerevisiae (O'Gorman et al., 1991, Science 251:1351-1355). If a cre/loxP recombinase system is used to regulate expression of the transgene, animals containing transgenes encoding both the Cre recombinase and a selected protein are required. Such animals can be provided through the construction of “double” transgenic animals, e.g., by mating two transgenic animals, one containing a transgene encoding a selected protein and the other containing a transgene encoding a recombinase.

[0230] Clones of the non-human transgenic animals described herein can also be produced according to the methods described in Wilmut et al. (1997) Nature 385:810-813 and PCT Publication NOS. WO 97/07668 and WO 97/07669.

[0231] IV. Pharmaceutical Compositions

[0232] The nucleic acid molecules, polypeptides, and antibodies (also referred to herein as “active compounds”) of the invention can be incorporated into pharmaceutical compositions suitable for administration. Such compositions typically comprise the nucleic acid molecule, protein, or antibody and a pharmaceutically acceptable carrier. As used herein the language “pharmaceutically acceptable carrier” is intended to include any and all solvents, dispersion media, coatings, antibacterial and antifungal agents, isotonic and absorption delaying agents, and the like, compatible with pharmaceutical administration. The use of such media and agents for pharmaceutically active substances is well known in the art. Except insofar as any conventional media or agent is incompatible with the active compound, use thereof in the compositions is contemplated. Supplementary active compounds can also be incorporated into the compositions.

[0233] The invention includes methods for preparing pharmaceutical compositions for modulating the expression or activity of a marker nucleic acid or protein. Such methods comprise formulating a pharmaceutically acceptable carrier with an agent which modulates expression or activity of a marker nucleic acid or protein. Such compositions can further include additional active agents. Thus, the invention further includes methods for preparing a pharmaceutical composition by formulating a pharmaceutically acceptable carrier with an agent which modulates expression or activity of a marker nucleic acid or protein and one or more additional active compounds.

[0234] The invention also provides methods (also referred to herein as “screening assays”) for identifying modulators, i.e., candidate or test compounds or agents (e.g., peptides, peptidomimetics, peptoids, small molecules or other drugs) which (a) bind to the marker, or (b) have a modulatory (e.g., stimulatory or inhibitory) effect on the activity of the marker or, more specifically, (c) have a modulatory effect on the interactions of the marker with one or more of its natural substrates (e.g., peptide, protein, hormone, co-factor, or nucleic acid), or (d) have a modulatory effect on the expression of the marker. Such assays typically comprise a reaction between the marker and one or more assay components. The other components may be either the test compound itself, or a combination of test compound and a natural binding partner of the marker.

[0235] The test compounds of the present invention may be obtained from any available source, including systematic libraries of natural and/or synthetic compounds. Test compounds may also be obtained by any of the numerous approaches in combinatorial library methods known in the art, including: biological libraries; peptoid libraries (libraries of molecules having the functionalities of peptides, but with a novel, non-peptide backbone which are resistant to enzymatic degradation but which nevertheless remain bioactive; see, e.g., Zuckermann et al., 1994, J. Med. Chem. 37:2678-85); spatially addressable parallel solid phase or solution phase libraries; synthetic library methods requiring deconvolution; the ‘one-bead one-compound’ library method; and synthetic library methods using affinity chromatography selection. The biological library and peptoid library approaches are limited to peptide libraries, while the other four approaches are applicable to peptide, non-peptide oligomer or small molecule libraries of compounds (Lam, 1997, Anticancer Drug Des. 12:145).

[0236] Examples of methods for the synthesis of molecular libraries can be found in the art, for example in: DeWitt et al. (1993) Proc. Natl. Acad. Sci. U.S.A. 90:6909; Erb et al. (1994) Proc. Natl. Acad. Sci. USA 91:11422; Zuckermann et al. (1994). J. Med. Chem. 37:2678; Cho et al. (1993) Science 261: 1303; Carrell et al. (1994) Angew. Chem. Int. Ed. Engl. 33:2059; Carell et al. (1994) Angew. Chem. Int. Ed. Engl. 33:2061; and in Gallop et al. (1994) J. Med. Chem. 37:1233.

[0237] Libraries of compounds may be presented in solution (e.g., Houghten, 1992, Biotechniques 13:412-421), or on beads (Lam, 1991, Nature 354:82-84), chips (Fodor, 1993, Nature 364:555-556), bacteria and/or spores, (Ladner, U.S. Pat. No. 5,223,409), plasmids (Cull et al, 1992, Proc Natl Acad Sci USA 89:1865-1869) or on phage (Scott and Smith, 1990, Science 249:386-390; Devlin, 1990, Science 249:404-406; Cwirla et al, 1990, Proc. Natl. Acad. Sci. 87:6378-6382; Felici, 1991, J. Mol. Biol. 222:301-310; Ladner, supra.).

[0238] In one embodiment, the invention provides assays for screening candidate or test compounds which are substrates of a protein encoded by or corresponding to a marker or biologically active portion thereof. In another embodiment, the invention provides assays for screening candidate or test compounds which bind to a protein encoded by or corresponding to a marker or biologically active portion thereof. Determining the ability of the test compound to directly bind to a protein can be accomplished, for example, by coupling the compound with a radioisotope or enzymatic label such that binding of the compound to the marker can be determined by detecting the labeled marker compound in a complex. For example, compounds (e.g., marker substrates) can be labeled with ¹²⁵I, ³⁵S, ¹⁴C, or ³H, either directly or indirectly, and the radioisotope detected by direct counting of radioemission or by scintillation counting. Alternatively, assay components can be enzymatically labeled with, for example, horseradish peroxidase, alkaline phosphatase, or luciferase, and the enzymatic label detected by determination of conversion of an appropriate substrate to product.

[0239] In another embodiment, the invention provides assays for screening candidate or test compounds which modulate the expression of a marker or the activity of a protein encoded by or corresponding to a marker, or a biologically active portion thereof. In all likelihood, the protein encoded by or corresponding to the marker can, in vivo, interact with one or more molecules, such as but not limited to, peptides, proteins, hormones, cofactors and nucleic acids. For the purposes of this discussion, such cellular and extracellular molecules are referred to herein as “binding partners” or marker “substrate”.

[0240] One necessary embodiment of the invention in order to facilitate such screening is the use of a protein encoded by or corresponding to marker to identify the protein's natural in vivo binding partners. There are many ways to accomplish this which are known to one skilled in the art. One example is the use of the marker protein as “bait protein” in a two-hybrid assay or three-hybrid assay (see, e.g., U.S. Pat. No. 5,283,317; Zervos et al, 1993, Cell 72:223-232; Madura et al, 1993, J. Biol. Chem. 268:12046-12054; Bartel et al ,1993, Biotechniques 14:920-924; Iwabuchi et al, 1993 Oncogene 8:1693-1696; Brent WO94/10300) in order to identify other proteins which bind to or interact with the marker (binding partners) and, therefore, are possibly involved in the natural function of the marker. Such marker binding partners are also likely to be involved in the propagation of signals by the marker protein or downstream elements of a marker protein-mediated signaling pathway. Alternatively, such marker protein binding partners may also be found to be inhibitors of the marker protein.

[0241] The two-hybrid system is based on the modular nature of most transcription factors, which consist of separable DNA-binding and activation domains. Briefly, the assay utilizes two different DNA constructs. In one construct, the gene that encodes a marker protein fused to a gene encoding the DNA binding domain of a known transcription factor (e.g., GAL-4). In the other construct, a DNA sequence, from a library of DNA sequences, that encodes an unidentified protein (“prey” or “sample”) is fused to a gene that codes for the activation domain of the known transcription factor. If the “bait” and the “prey” proteins are able to interact, in vivo, forming a marker-dependent complex, the DNA-binding and activation domains of the transcription factor are brought into close proximity. This proximity allows transcription of a reporter gene (e.g., LacZ) which is operably linked to a transcriptional regulatory site responsive to the transcription factor. Expression of the reporter gene can be readily detected and cell colonies containing the functional transcription factor can be isolated and used to obtain the cloned gene which encodes the protein which interacts with the marker protein.

[0242] In a further embodiment, assays may be devised through the use of the invention for the purpose of identifying compounds which modulate (e.g., affect either positively or negatively) interactions between a marker protein and its substrates and/or binding partners. Such compounds can include, but are not limited to, molecules such as antibodies, peptides, hormones, oligonucleotides, nucleic acids, and analogs thereof. Such compounds may also be obtained from any available source, including systematic libraries of natural and/or synthetic compounds. The preferred assay components for use in this embodiment is an colon cancer marker protein identified herein, the known binding partner and/or substrate of same, and the test compound. Test compounds can be supplied from any source.

[0243] The basic principle of the assay systems used to identify compounds that interfere with the interaction between the marker protein and its binding partner involves preparing a reaction mixture containing the marker protein and its binding partner under conditions and for a time sufficient to allow the two products to interact and bind, thus forming a complex. In order to test an agent for inhibitory activity, the reaction mixture is prepared in the presence and absence of the test compound. The test compound can be initially included in the reaction mixture, or can be added at a time subsequent to the addition of the marker protein and its binding partner. Control reaction mixtures are incubated without the test compound or with a placebo. The formation of any complexes between the marker protein and its binding partner is then detected. The formation of a complex in the control reaction, but less or no such formation in the reaction mixture containing the test compound, indicates that the compound interferes with the interaction of the marker protein and its binding partner. Conversely, the formation of more complex in the presence of compound than in the control reaction indicates that the compound may enhance interaction of the marker protein and its binding partner.

[0244] The assay for compounds that interfere with the interaction of the marker protein with its binding partner may be conducted in a heterogeneous or homogeneous format. Heterogeneous assays involve anchoring either the marker protein or its binding partner onto a solid phase and detecting complexes anchored to the solid phase at the end of the reaction. In homogeneous assays, the entire reaction is carried out in a liquid phase. In either approach, the order of addition of reactants can be varied to obtain different information about the compounds being tested. For example, test compounds that interfere with the interaction between the marker proteins and the binding partners (e.g., by competition) can be identified by conducting the reaction in the presence of the test substance, i.e., by adding the test substance to the reaction mixture prior to or simultaneously with the marker and its interactive binding partner. Alternatively, test compounds that disrupt preformed complexes, e.g., compounds with higher binding constants that displace one of the components from the complex, can be tested by adding the test compound to the reaction mixture after complexes have been formed. The various formats are briefly described below.

[0245] In a heterogeneous assay system, either the marker protein or its binding partner is anchored onto a solid surface or matrix, while the other corresponding non-anchored component may be labeled, either directly or indirectly. In practice, microtitre plates are often utilized for this approach. The anchored species can be immobilized by a number of methods, either non-covalent or covalent, that are typically well known to one who practices the art. Non-covalent attachment can often be accomplished simply by coating the solid surface with a solution of the marker protein or its binding partner and drying. Alternatively, an immobilized antibody specific for the assay component to be anchored can be used for this purpose. Such surfaces can often be prepared in advance and stored.

[0246] In related embodiments, a fusion protein can be provided which adds a domain that allows one or both of the assay components to be anchored to a matrix. For example, glutathione-S-transferase/marker fusion proteins or glutathione-S-transferase/binding partner can be adsorbed onto glutathione sepharose beads (Sigma Chemical, St. Louis, Mo.) or glutathione derivatized microtiter plates, which are then combined with the test compound or the test compound and either the non-adsorbed marker or its binding partner, and the mixture incubated under conditions conducive to complex formation (e.g., physiological conditions). Following incubation, the beads or microtiter plate wells are washed to remove any unbound assay components, the immobilized complex assessed either directly or indirectly, for example, as described above. Alternatively, the complexes can be dissociated from the matrix, and the level of marker binding or activity determined using standard techniques.

[0247] Other techniques for immobilizing proteins on matrices can also be used in the screening assays of the invention. For example, either a marker protein or a marker protein binding partner can be immobilized utilizing conjugation of biotin and streptavidin. Biotinylated marker protein or target molecules can be prepared from biotin-NHS (N-hydroxy-succinimide) using techniques known in the art (e.g., biotinylation kit, Pierce Chemicals, Rockford, Ill.), and immobilized in the wells of streptavidin-coated 96 well plates (Pierce Chemical). In certain embodiments, the protein-immobilized surfaces can be prepared in advance and stored.

[0248] In order to conduct the assay, the corresponding partner of the immobilized assay component is exposed to the coated surface with or without the test compound. After the reaction is complete, unreacted assay components are removed (e.g., by washing) and any complexes formed will remain immobilized on the solid surface. The detection of complexes anchored on the solid surface can be accomplished in a number of ways. Where the non-immobilized component is pre-labeled, the detection of label immobilized on the surface indicates that complexes were formed. Where the non-immobilized component is not pre-labeled, an indirect label can be used to detect complexes anchored on the surface; e.g., using a labeled antibody specific for the initially non-immobilized species (the antibody, in turn, can be directly labeled or indirectly labeled with, e.g., a labeled anti-Ig antibody). Depending upon the order of addition of reaction components, test compounds which modulate (inhibit or enhance) complex formation or which disrupt preformed complexes can be detected.

[0249] In an alternate embodiment of the invention, a homogeneous assay may be used. This is typically a reaction, analogous to those mentioned above, which is conducted in a liquid phase in the presence or absence of the test compound. The formed complexes are then separated from unreacted components, and the amount of complex formed is determined. As mentioned for heterogeneous assay systems, the order of addition of reactants to the liquid phase can yield information about which test compounds modulate (inhibit or enhance) complex formation and which disrupt preformed complexes.

[0250] In such a homogeneous assay, the reaction products may be separated from unreacted assay components by any of a number of standard techniques, including but not limited to: differential centrifugation, chromatography, electrophoresis and immunoprecipitation. In differential centrifugation, complexes of molecules may be separated from uncomplexed molecules through a series of centrifugal steps, due to the different sedimentation equilibria of complexes based on their different sizes and densities (see, for example, Rivas, G., and Minton, A. P., Trends Biochem Sci 1993 August18(8):284-7). Standard chromatographic techniques may also be utilized to separate complexed molecules from uncomplexed ones. For example, gel filtration chromatography separates molecules based on size, and through the utilization of an appropriate gel filtration resin in a column format, for example, the relatively larger complex may be separated from the relatively smaller uncomplexed components. Similarly, the relatively different charge properties of the complex as compared to the uncomplexed molecules may be exploited to differentially separate the complex from the remaining individual reactants, for example through the use of ion-exchange chromatography resins. Such resins and chromatographic techniques are well known to one skilled in the art (see, e.g., Heegaard, 1998, J Mol. Recognit. 11: 141-148; Hage and Tweed, 1997, J. Chromatogr. B. Biomed. Sci. Appl., 699:499-525). Gel electrophoresis may also be employed to separate complexed molecules from unbound species (see, e.g., Ausubel et al (eds.), In: Current Protocols in Molecular Biology, J. Wiley & Sons, New York. 1999). In this technique, protein or nucleic acid complexes are separated based on size or charge, for example. In order to maintain the binding interaction during the electrophoretic process, nondenaturing gels in the absence of reducing agent are typically preferred, but conditions appropriate to the particular interactants will be well known to one skilled in the art. Immunoprecipitation is another common technique utilized for the isolation of a protein-protein complex from solution (see, e.g., Ausubel et al (eds.), In: Current Protocols in Molecular Biology, J. Wiley & Sons, New York. 1999). In this technique, all proteins binding to an antibody specific to one of the binding molecules are precipitated from solution by conjugating the antibody to a polymer bead that may be readily collected by centrifugation. The bound assay components are released from the beads (through a specific proteolysis event or other technique well known in the art which will not disturb the protein-protein interaction in the complex), and a second immunoprecipitation step is performed, this time utilizing antibodies specific for the correspondingly different interacting assay component. In this manner, only formed complexes should remain attached to the beads. Variations in complex formation in both the presence and the absence of a test compound can be compared, thus offering information about the ability of the compound to modulate interactions between the marker protein and its binding partner.

[0251] Also within the scope of the present invention are methods for direct detection of interactions between the marker protein and its natural binding partner and/or a test compound in a homogeneous or heterogeneous assay system without further sample manipulation. For example, the technique of fluorescence energy transfer may be utilized (see, e.g., Lakowicz et al, U.S. Pat. No. 5,631,169; Stavrianopoulos et al, U.S. Pat. No. 4,868,103). Generally, this technique involves the addition of a fluorophore label on a first ‘donor’ molecule (e.g., marker or test compound) such that its emitted fluorescent energy will be absorbed by a fluorescent label on a second, ‘acceptor’ molecule (e.g., marker or test compound), which in turn is able to fluoresce due to the absorbed energy. Alternately, the ‘donor’ protein molecule may simply utilize the natural fluorescent energy of tryptophan residues. Labels are chosen that emit different wavelengths of light, such that the ‘acceptor’ molecule label may be differentiated from that of the ‘donor’. Since the efficiency of energy transfer between the labels is related to the distance separating the molecules, spatial relationships between the molecules can be assessed. In a situation in which binding occurs between the molecules, the fluorescent emission of the ‘acceptor’ molecule label in the assay should be maximal. An FET binding event can be conveniently measured through standard fluorometric detection means well known in the art (e.g., using a fluorimeter). A test substance which either enhances or hinders participation of one of the species in the preformed complex will result in the generation of a signal variant to that of background. In this way, test substances that modulate interactions between a marker and its binding partner can be identified in controlled assays.

[0252] In another embodiment, modulators of marker expression are identified in a method wherein a cell is contacted with a candidate compound and the expression of marker mRNA or protein in the cell, is determined. The level of expression of marker mRNA or protein in the presence of the candidate compound is compared to the level of expression of marker mRNA or protein in the absence of the candidate compound. The candidate compound can then be identified as a modulator of marker expression based on this comparison. For example, when expression of marker mRNA or protein is greater (statistically significantly greater) in the presence of the candidate compound than in its absence, the candidate compound is identified as a stimulator of marker mRNA or protein expression. Conversely, when expression of marker mRNA or protein is less (statistically significantly less) in the presence of the candidate compound than in its absence, the candidate compound is identified as an inhibitor of marker mRNA or protein expression. The level of marker mRNA or protein expression in the cells can be determined by methods described herein for detecting marker mRNA or protein.

[0253] In another aspect, the invention pertains to a combination of two or more of the assays described herein. For example, a modulating agent can be identified using a cell-based or a cell free assay, and the ability of the agent to modulate the activity of a marker protein can be further confirmed in vivo, e.g., in a whole animal model for cellular transformation and/or tumorigenesis.

[0254] This invention further pertains to novel agents identified by the above-described screening assays. Accordingly, it is within the scope of this invention to further use an agent identified as described herein in an appropriate animal model. For example, an agent identified as described herein (e.g., an marker modulating agent, an antisense marker nucleic acid molecule, an marker-specific antibody, or an marker-binding partner) can be used in an animal model to determine the efficacy, toxicity, or side effects of treatment with such an agent. Alternatively, an agent identified as described herein can be used in an animal model to determine the mechanism of action of such an agent. Furthermore, this invention pertains to uses of novel agents identified by the above-described screening assays for treatments as described herein.

[0255] It is understood that appropriate doses of small molecule agents and protein or polypeptide agents depends upon a number of factors within the knowledge of the ordinarily skilled physician, veterinarian, or researcher. The dose(s) of these agents will vary, for example, depending upon the identity, size, and condition of the subject or sample being treated, further depending upon the route by which the composition is to be administered, if applicable, and the effect which the practitioner desires the agent to have upon the nucleic acid or polypeptide of the invention. Exemplary doses of a small molecule include milligram or microgram amounts per kilogram of subject or sample weight (e.g. about 1 microgram per kilogram to about 500 milligrams per kilogram, about 100 micrograms per kilogram to about 5 milligrams per kilogram, or about 1 microgram per kilogram to about 50 micrograms per kilogram). Exemplary doses of a protein or polypeptide include gram, milligram or microgram amounts per kilogram of subject or sample weight (e.g. about 1 microgram per kilogram to about 5 grams per kilogram, about 100 micrograms per kilogram to about 500 milligrams per kilogram, or about 1 milligram per kilogram to about 50 milligrams per kilogram). It is furthermore understood that appropriate doses of one of these agents depend upon the potency of the agent with respect to the expression or activity to be modulated. Such appropriate doses can be determined using the assays described herein. When one or more of these agents is to be administered to an animal (e.g. a human) in order to modulate expression or activity of a polypeptide or nucleic acid of the invention, a physician, veterinarian, or researcher can, for example, prescribe a relatively low dose at first, subsequently increasing the dose until an appropriate response is obtained. In addition, it is understood that the specific dose level for any particular animal subject will depend upon a variety of factors including the activity of the specific agent employed, the age, body weight, general health, gender, and diet of the subject, the time of administration, the route of administration, the rate of excretion, any drug combination, and the degree of expression or activity to be modulated.

[0256] A pharmaceutical composition of the invention is formulated to be compatible with its intended route of administration. Examples of routes of administration include parenteral, e.g., intravenous, intradermal, subcutaneous, oral (e.g., inhalation), transdermal (topical), transmucosal, and rectal administration. Solutions or suspensions used for parenteral, intradermal, or subcutaneous application can include the following components: a sterile diluent such as water for injection, saline solution, fixed oils, polyethylene glycols, glycerine, propylene glycol or other synthetic solvents; antibacterial agents such as benzyl alcohol or methyl parabens; antioxidants such as ascorbic acid or sodium bisulfite; chelating agents such as ethylenediamine-tetraacetic acid; buffers such as acetates, citrates or phosphates and agents for the adjustment of tonicity such as sodium chloride or dextrose. pH can be adjusted with acids or bases, such as hydrochloric acid or sodium hydroxide. The parenteral preparation can be enclosed in ampules, disposable syringes or multiple dose vials made of glass or plastic.

[0257] Pharmaceutical compositions suitable for injectable use include sterile aqueous solutions (where water soluble) or dispersions and sterile powders for the extemporaneous preparation of sterile injectable solutions or dispersions. For intravenous administration, suitable carriers include physiological saline, bacteriostatic water, Cremophor EL (BASF; Parsippany, N.J.) or phosphate buffered saline (PBS). In all cases, the composition must be sterile and should be fluid to the extent that easy syringability exists. It must be stable under the conditions of manufacture and storage and must be preserved against the contaminating action of microorganisms such as bacteria and fungi. The carrier can be a solvent or dispersion medium containing, for example, water, ethanol, polyol (for example, glycerol, propylene glycol, and liquid polyethylene glycol, and the like), and suitable mixtures thereof. The proper fluidity can be maintained, for example, by the use of a coating such as lecithin, by the maintenance of the required particle size in the case of dispersion and by the use of surfactants. Prevention of the action of microorganisms can be achieved by various antibacterial and antifungal agents, for example, parabens, chlorobutanol, phenol, ascorbic acid, thimerosal, and the like. In many cases, it will be preferable to include isotonic agents, for example, sugars, polyalcohols such as mannitol, sorbitol, or sodium chloride in the composition. Prolonged absorption of the injectable compositions can be brought about by including in the composition an agent which delays absorption, for example, aluminum monostearate and gelatin.

[0258] Sterile injectable solutions can be prepared by incorporating the active compound (e.g., a polypeptide or antibody) in the required amount in an appropriate solvent with one or a combination of ingredients enumerated above, as required, followed by filtered sterilization. Generally, dispersions are prepared by incorporating the active compound into a sterile vehicle which contains a basic dispersion medium, and then incorporating the required other ingredients from those enumerated above. In the case of sterile powders for the preparation of sterile injectable solutions, the preferred methods of preparation are vacuum drying and freeze-drying which yields a powder of the active ingredient plus any additional desired ingredient from a previously sterile-filtered solution thereof.

[0259] Oral compositions generally include an inert diluent or an edible carrier. They can be enclosed in gelatin capsules or compressed into tablets. For the purpose of oral therapeutic administration, the active compound can be incorporated with excipients and used in the form of tablets, troches, or capsules. Oral compositions can also be prepared using a fluid carrier for use as a mouthwash, wherein the compound in the fluid carrier is applied orally and swished and expectorated or swallowed.

[0260] Pharmaceutically compatible binding agents, and/or adjuvant materials can be included as part of the composition. The tablets, pills, capsules, troches, and the like can contain any of the following ingredients, or compounds of a similar nature: a binder such as microcrystalline cellulose, gum tragacanth or gelatin; an excipient such as starch or lactose, a disintegrating agent such as alginic acid, Primogel, or corn starch; a lubricant such as magnesium stearate or Sterotes; a glidant such as colloidal silicon dioxide; a sweetening agent such as sucrose or saccharin; or a flavoring agent such as peppermint, methyl salicylate, or orange flavoring.

[0261] For administration by inhalation, the compounds are delivered in the form of an aerosol spray from a pressurized container or dispenser which contains a suitable propellant, e.g., a gas such as carbon dioxide, or a nebulizer.

[0262] Systemic administration can also be by transmucosal or transdermal means. For transmucosal or transdermal administration, penetrants appropriate to the barrier to be permeated are used in the formulation. Such penetrants are generally known in the art, and include, for example, for transmucosal administration, detergents, bile salts, and fusidic acid derivatives. Transmucosal administration can be accomplished through the use of nasal sprays or suppositories. For transdermal administration, the active compounds are formulated into ointments, salves, gels, or creams as generally known in the art.

[0263] The compounds can also be prepared in the form of suppositories (e.g., with conventional suppository bases such as cocoa butter and other glycerides) or retention enemas for rectal delivery.

[0264] In one embodiment, the active compounds are prepared with carriers that will protect the compound against rapid elimination from the body, such as a controlled release formulation, including implants and microencapsulated delivery systems. Biodegradable, biocompatible polymers can be used, such as ethylene vinyl acetate, polyanhydrides, polyglycolic acid, collagen, polyorthoesters, and polylactic acid. Methods for preparation of such formulations will be apparent to those skilled in the art. The materials can also be obtained commercially from Alza Corporation and Nova Pharmaceuticals, Inc. Liposomal suspensions (including liposomes having monoclonal antibodies incorporated therein or thereon) can also be used as pharmaceutically acceptable carriers. These can be prepared according to methods known to those skilled in the art, for example, as described in U.S. Pat. No. 4,522,811.

[0265] It is especially advantageous to formulate oral or parenteral compositions in dosage unit form for ease of administration and uniformity of dosage. Dosage unit form as used herein refers to physically discrete units suited as unitary dosages for the subject to be treated; each unit containing a predetermined quantity of active compound calculated to produce the desired therapeutic effect in association with the required pharmaceutical carrier. The specification for the dosage unit forms of the invention are dictated by and directly dependent on the unique characteristics of the active compound and the particular therapeutic effect to be achieved, and the limitations inherent in the art of compounding such an active compound for the treatment of individuals.

[0266] For antibodies, the preferred dosage is 0.1 mg/kg to 100 mg/kg of body weight (generally 10 mg/kg to 20 mg/kg). If the antibody is to act in the brain, a dosage of 50 mg/kg to 100 mg/kg is usually appropriate. Generally, partially human antibodies and fully human antibodies have a longer half-life within the human body than other antibodies. Accordingly, lower dosages and less frequent administration is often possible. Modifications such as lipidation can be used to stabilize antibodies and to enhance uptake and tissue penetration (e.g., into the colon epithelium). A method for lipidation of antibodies is described by Cruikshank et al. (1997) J. Acquired Immune Deficiency Syndromes and Human Retrovirology 14:193.

[0267] The invention also provides vaccine compositions for the prevention and/or treatment of colon cancer. The invention provides colon cancer vaccine compositions in which a protein of a marker of Table 1, or a combination of proteins of the markers of Table 1, are introduced into a subject in order to stimulate an immune response against the colon cancer. The invention also provides colon cancer vaccine compositions in which a gene expression construct, which expresses a marker or fragment of a marker identified in Table 1, is introduced into the subject such that a protein or fragment of a protein encoded by a marker of Table 1 is produced by transfected cells in the subject at a higher than normal level and elicits an immune response.

[0268] In one embodiment, a colon cancer vaccine is provided and employed as an immunotherapeutic agent for the prevention of colon cancer. In another embodiment, a colon cancer vaccine is provided and employed as an immunotherapeutic agent for the treatment of colon cancer.

[0269] By way of example, a colon cancer vaccine comprised of the proteins of the markers of Table 1, may be employed for the prevention and/or treatment of colon cancer in a subject by administering the vaccine by a variety of routes, e.g., intradermally, subcutaneously, or intramuscularly. In addition, the colon cancer vaccine can be administered together with adjuvants and/or immunomodulators to boost the activity of the vaccine and the subject's response. In one embodiment, devices and/or compositions containing the vaccine, suitable for sustained or intermittent release could be, implanted in the body or topically applied thereto for the relatively slow release of such materials into the body. The colon cancer vaccine can be introduced along with immunomodulatory compounds, which can alter the type of immune response produced in order to produce a response which will be more effective in eliminating the cancer.

[0270] In another embodiment, a colon cancer vaccine comprised of an expression construct of the markers of Table 1, may be introduced by injection into muscle or by coating onto microprojectiles and using a device designed for the purpose to fire the projectiles at high speed into the skin. The cells of the subject will then express the protein(s) or fragments of proteins of the markers of Table 1 and induce an immune response. In addition, the colon cancer vaccine may be introduced along with expression constructs for immunomodulatory molecules, such as cytokines, which may increase the immune response or modulate the type of immune response produced in order to produce a response which will be more effective in eliminating the cancer.

[0271] The marker nucleic acid molecules can be inserted into vectors and used as gene therapy vectors. Gene therapy vectors can be delivered to a subject by, for example, intravenous injection, local administration (U.S. Pat. No. 5,328,470), or by stereotactic injection (see, e.g., Chen et al., 1994, Proc. Natl. Acad. Sci. USA 91:3054-3057). The pharmaceutical preparation of the gene therapy vector can include the gene therapy vector in an acceptable diluent, or can comprise a slow release matrix in which the gene delivery vehicle is imbedded. Alternatively, where the complete gene delivery vector can be produced intact from recombinant cells, e.g. retroviral vectors, the pharmaceutical preparation can include one or more cells which produce the gene delivery system.

[0272] The pharmaceutical compositions can be included in a container, pack, or dispenser together with instructions for administration.

[0273] V. Predictive Medicine

[0274] The present invention pertains to the field of predictive medicine in which diagnostic assays, prognostic assays, pharmacogenomics, and monitoring clinical trails are used for prognostic (predictive) purposes to thereby treat an individual prophylactically. Accordingly, one aspect of the present invention relates to diagnostic assays for determining the level of expression of one or more marker proteins or nucleic acids, in order to determine whether an individual is at risk of developing colon cancer. Such assays can be used for prognostic or predictive purposes to thereby prophylactically treat an individual prior to the onset of the cancer.

[0275] Yet another aspect of the invention pertains to monitoring the influence of agents (e.g., drugs or other compounds administered either to inhibit colon cancer or to treat or prevent any other disorder {i.e. in order to understand any colon carcinogenic effects that such treatment may have}) on the expression or activity of a marker of the invention in clinical trials. These and other agents are described in further detail in the following sections.

[0276] A. Diagnostic Assays

[0277] An exemplary method for detecting the presence or absence of a marker protein or nucleic acid in a biological sample involves obtaining a biological sample (e.g. a colon-associated body fluid) from a test subject and contacting the biological sample with a compound or an agent capable of detecting the polypeptide or nucleic acid (e.g., mRNA, genomic DNA, or cDNA). The detection methods of the invention can thus be used to detect mRNA, protein, cDNA, or genomic DNA, for example, in a biological sample in vitro as well as in vivo. For example, in vitro techniques for detection of mRNA include Northern hybridizations and in situ hybridizations. In vitro techniques for detection of a marker protein include enzyme linked immunosorbent assays (ELISAs), Western blots, immunoprecipitations and immunofluorescence. In vitro techniques for detection of genomic DNA include Southern hybridizations. Furthermore, in vivo techniques for detection of a marker protein include introducing into a subject a labeled antibody directed against the protein or fragment thereof. For example, the antibody can be labeled with a radioactive marker whose presence and location in a subject can be detected by standard imaging techniques.

[0278] A general principle of such diagnostic and prognostic assays involves preparing a sample or reaction mixture that may contain a marker, and a probe, under appropriate conditions and for a time sufficient to allow the marker and probe to interact and bind, thus forming a complex that can be removed and/or detected in the reaction mixture. These assays can be conducted in a variety of ways.

[0279] For example, one method to conduct such an assay would involve anchoring the marker or probe onto a solid phase support, also referred to as a substrate, and detecting target marker/probe complexes anchored on the solid phase at the end of the reaction. In one embodiment of such a method, a sample from a subject, which is to be assayed for presence and/or concentration of marker, can be anchored onto a carrier or solid phase support. In another embodiment, the reverse situation is possible, in which the probe can be anchored to a solid phase and a sample from a subject can be allowed to react as an unanchored component of the assay.

[0280] There are many established methods for anchoring assay components to a solid phase. These include, without limitation, marker or probe molecules which are immobilized through conjugation of biotin and streptavidin. Such biotinylated assay components can be prepared from biotin-NHS (N-hydroxy-succinimide) using techniques known in the art (e.g., biotinylation kit, Pierce Chemicals, Rockford, Ill.), and immobilized in the wells of streptavidin-coated 96 well plates (Pierce Chemical). In certain embodiments, the surfaces with immobilized assay components can be prepared in advance and stored.

[0281] Other suitable carriers or solid phase supports for such assays include any material capable of binding the class of molecule to which the marker or probe belongs. Well-known supports or carriers include, but are not limited to, glass, polystyrene, nylon, polypropylene, nylon, polyethylene, dextran, amylases, natural and modified celluloses, polyacrylamides, gabbros, and magnetite.

[0282] In order to conduct assays with the above mentioned approaches, the non-immobilized component is added to the solid phase upon which the second component is anchored. After the reaction is complete, uncomplexed components may be removed (e.g., by washing) under conditions such that any complexes formed will remain immobilized upon the solid phase. The detection of marker/probe complexes anchored to the solid phase can be accomplished in a number of methods outlined herein.

[0283] In a preferred embodiment, the probe, when it is the unanchored assay component, can be labeled for the purpose of detection and readout of the assay, either directly or indirectly, with detectable labels discussed herein and which are well-known to one skilled in the art.

[0284] It is also possible to directly detect marker/probe complex formation without further manipulation or labeling of either component (marker or probe), for example by utilizing the technique of fluorescence energy transfer (see, for example, Lakowicz et al., U.S. Pat. No. 5,631,169; Stavrianopoulos, et al., U.S. Pat. No. 4,868,103). A fluorophore label on the first, ‘donor’ molecule is selected such that, upon excitation with incident light of appropriate wavelength, its emitted fluorescent energy will be absorbed by a fluorescent label on a second ‘acceptor’ molecule, which in turn is able to fluoresce due to the absorbed energy. Alternately, the ‘donor’ protein molecule may simply utilize the natural fluorescent energy of tryptophan residues. Labels are chosen that emit different wavelengths of light, such that the ‘acceptor’ molecule label may be differentiated from that of the ‘donor’. Since the efficiency of energy transfer between the labels is related to the distance separating the molecules, spatial relationships between the molecules can be assessed. In a situation in which binding occurs between the molecules, the fluorescent emission of the ‘acceptor’ molecule label in the assay should be maximal. An FET binding event can be conveniently measured through standard fluorometric detection means well known in the art (e.g., using a fluorimeter).

[0285] In another embodiment, determination of the ability of a probe to recognize a marker can be accomplished without labeling either assay component (probe or marker) by utilizing a technology such as real-time Biomolecular Interaction Analysis (BIA) (see, e.g., Sjolander, S. and Urbaniczky, C., 1991, Anal. Chem. 63:2338-2345 and Szabo et al., 1995, Curr. Opin. Struct. Biol. 5:699-705). As used herein, “BIA” or “surface plasmon resonance” is a technology for studying biospecific interactions in real time, without labeling any of the interactants (e.g., BIAcore). Changes in the mass at the binding surface (indicative of a binding event) result in alterations of the refractive index of light near the surface (the optical phenomenon of surface plasmon resonance (SPR)), resulting in a detectable signal which can be used as an indication of real-time reactions between biological molecules.

[0286] Alternatively, in another embodiment, analogous diagnostic and prognostic assays can be conducted with marker and probe as solutes in a liquid phase. In such an assay, the complexed marker and probe are separated from uncomplexed components by any of a number of standard techniques, including but not limited to: differential centrifugation, chromatography, electrophoresis and immunoprecipitation. In differential centrifugation, marker/probe complexes may be separated from uncomplexed assay components through a series of centrifugal steps, due to the different sedimentation equilibria of complexes based on their different sizes and densities (see, for example, Rivas, G., and Minton, A. P., 1993, Trends Biochem Sci. 18(8):284-7). Standard chromatographic techniques may also be utilized to separate complexed molecules from uncomplexed ones. For example, gel filtration chromatography separates molecules based on size, and through the utilization of an appropriate gel filtration resin in a column format, for example, the relatively larger complex may be separated from the relatively smaller uncomplexed components. Similarly, the relatively different charge properties of the marker/probe complex as compared to the uncomplexed components may be exploited to differentiate the complex from uncomplexed components, for example through the utilization of ion-exchange chromatography resins. Such resins and chromatographic techniques are well known to one skilled in the art (see, e.g., Heegaard, N. H., 1998, J. Mol. Recognit. Winter 11(1-6): 141-8; Hage, D. S., and Tweed, S. A. J Chromatogr B Biomed Sci Appl 1997 October 10;699(1-2):499-525). Gel electrophoresis may also be employed to separate complexed assay components from unbound components (see, e.g., Ausubel et al., ed., Current Protocols in Molecular Biology, John Wiley & Sons, New York, 1987-1999). In this technique, protein or nucleic acid complexes are separated based on size or charge, for example. In order to maintain the binding interaction during the electrophoretic process, non-denaturing gel matrix materials and conditions in the absence of reducing agent are typically preferred. Appropriate conditions to the particular assay and components thereof will be well known to one skilled in the art.

[0287] In a particular embodiment, the level of marker mRNA can be determined both by in situ and by in vitro formats in a biological sample using methods known in the art. The term “biological sample” is intended to include tissues, cells, biological fluids and isolates thereof, isolated from a subject, as well as tissues, cells and fluids present within a subject. Many expression detection methods use isolated RNA. For in vitro methods, any RNA isolation technique that does not select against the isolation of mRNA can be utilized for the purification of RNA from colon cells (see, e.g., Ausubel et al., ed., Current Protocols in Molecular Biology, John Wiley & Sons, New York 1987-1999). Additionally, large numbers of tissue samples can readily be processed using techniques well known to those of skill in the art, such as, for example, the single-step RNA isolation process of Chomczynski (1989, U.S. Pat. No. 4,843,155).

[0288] The isolated mRNA can be used in hybridization or amplification assays that include, but are not limited to, Southern or Northern analyses, polymerase chain reaction analyses and probe arrays. One preferred diagnostic method for the detection of mRNA levels involves contacting the isolated mRNA with a nucleic acid molecule (probe) that can hybridize to the mRNA encoded by the gene being detected. The nucleic acid probe can be, for example, a full-length cDNA, or a portion thereof, such as an oligonucleotide of at least 7, 15, 30, 50, 100, 250 or 500 nucleotides in length and sufficient to specifically hybridize under stringent conditions to a mRNA or genomic DNA encoding a marker of the present invention. Other suitable probes for use in the diagnostic assays of the invention are described herein. Hybridization of an mRNA with the probe indicates that the marker in question is being expressed.

[0289] In one format, the mRNA is immobilized on a solid surface and contacted with a probe, for example by running the isolated mRNA on an agarose gel and transferring the mRNA from the gel to a membrane, such as nitrocellulose. In an alternative format, the probe(s) are immobilized on a solid surface and the mRNA is contacted with the probe(s), for example, in an Affymetrix gene chip array. A skilled artisan can readily adapt known mRNA detection methods for use in detecting the level of mRNA encoded by the markers of the present invention.

[0290] An alternative method for determining the level of mRNA marker in a sample involves the process of nucleic acid amplification, e.g., by rtPCR (the experimental embodiment set forth in Mullis, 1987, U.S. Pat. No. 4,683,202), ligase chain reaction (Barany, 1991, Proc. Natl. Acad. Sci. USA, 88:189-193), self sustained sequence replication (Guatelli et al., 1990, Proc. Natl. Acad. Sci. USA 87:1874-1878), transcriptional amplification system (Kwoh et al., 1989, Proc. Natl. Acad. Sci. USA 86:1173-1177), Q-Beta Replicase (Lizardi et al., 1988, Bio/Technology 6:1197), rolling circle replication (Lizardi et al., U.S. Pat. No. 5,854,033) or any other nucleic acid amplification method, followed by the detection of the amplified molecules using techniques well known to those of skill in the art. These detection schemes are especially useful for the detection of nucleic acid molecules if such molecules are present in very low numbers. As used herein, amplification primers are defined as being a pair of nucleic acid molecules that can anneal to 5′ or 3′ regions of a gene (plus and minus strands, respectively, or vice-versa) and contain a short region in between. In general, amplification primers are from about 10 to 30 nucleotides in length and flank a region from about 50 to 200 nucleotides in length. Under appropriate conditions and with appropriate reagents, such primers permit the amplification of a nucleic acid molecule comprising the nucleotide sequence flanked by the primers.

[0291] For in situ methods, mRNA does not need to be isolated from the colon cells prior to detection. In such methods, a cell or tissue sample is prepared/processed using known histological methods. The sample is then immobilized on a support, typically a glass slide, and then contacted with a probe that can hybridize to mRNA that encodes the marker.

[0292] As an alternative to making determinations based on the absolute expression level of the marker, determinations may be based on the normalized expression level of the marker. Expression levels are normalized by correcting the absolute expression level of a marker by comparing its expression to the expression of a gene that is not a marker, e.g., a housekeeping gene that is constitutively expressed. Suitable genes for normalization include housekeeping genes such as the actin gene, or epithelial cell-specific genes. This normalization allows the comparison of the expression level in one sample, e.g., a patient sample, to another sample, e.g., a non-colon cancer sample, or between samples from different sources.

[0293] Alternatively, the expression level can be provided as a relative expression level. To determine a relative expression level of a marker, the level of expression of the marker is determined for 10 or more samples of normal versus cancer cell isolates, preferably 50 or more samples, prior to the determination of the expression level for the sample in question. The mean expression level of each of the genes assayed in the larger number of samples is determined and this is used as a baseline expression level for the marker. The expression level of the marker determined for the test sample (absolute level of expression) is then divided by the mean expression value obtained for that marker. This provides a relative expression level.

[0294] Preferably, the samples used in the baseline determination will be from colon cancer or from non-colon cancer cells of colon tissue. The choice of the cell source is dependent on the use of the relative expression level. Using expression found in normal tissues as a mean expression score aids in validating whether the marker assayed is colon specific (versus normal cells). In addition, as more data is accumulated, the mean expression value can be revised, providing improved relative expression values based on accumulated data. Expression data from colon cells provides a means for grading the severity of the colon cancer state.

[0295] In another embodiment of the present invention, a marker protein is detected. A preferred agent for detecting marker protein of the invention is an antibody capable of binding to such a protein or a fragment thereof, preferably an antibody with a detectable label. Antibodies can be polyclonal, or more preferably, monoclonal. An intact antibody, or a fragment or derivative thereof (e.g., Fab or F(ab′)₂) can be used. The term “labeled”, with regard to the probe or antibody, is intended to encompass direct labeling of the probe or antibody by coupling (i.e., physically linking) a detectable substance to the probe or antibody, as well as indirect labeling of the probe or antibody by reactivity with another reagent that is directly labeled. Examples of indirect labeling include detection of a primary antibody using a fluorescently labeled secondary antibody and end-labeling of a DNA probe with biotin such that it can be detected with fluorescently labeled streptavidin.

[0296] Proteins from colon cells can be isolated using techniques that are well known to those of skill in the art. The protein isolation methods employed can, for example, be such as those described in Harlow and Lane (Harlow and Lane, 1988, Antibodies: A Laboratory Manual, Cold Spring Harbor Laboratory Press, Cold Spring Harbor, N.Y.).

[0297] A variety of formats can be employed to determine whether a sample contains a protein that binds to a given antibody. Examples of such formats include, but are not limited to, enzyme immunoassay (EIA), radioimmunoassay (RIA), Western blot analysis and enzyme linked immunoabsorbant assay (ELISA). A skilled artisan can readily adapt known protein/antibody detection methods for use in determining whether colon cells express a marker of the present invention.

[0298] In one format, antibodies, or antibody fragments or derivatives, can be used in methods such as Western blots or immunofluorescence techniques to detect the expressed proteins. In such uses, it is generally preferable to immobilize either the antibody or proteins on a solid support. Suitable solid phase supports or carriers include any support capable of binding an antigen or an antibody. Well-known supports or carriers include glass, polystyrene, polypropylene, polyethylene, dextran, nylon, amylases, natural and modified celluloses, polyacrylamides, gabbros, and magnetite.

[0299] One skilled in the art will know many other suitable carriers for binding antibody or antigen, and will be able to adapt such support for use with the present invention. For example, protein isolated from colon cells can be run on a polyacrylamide gel electrophoresis and immobilized onto a solid phase support such as nitrocellulose. The support can then be washed with suitable buffers followed by treatment with the detectably labeled antibody. The solid phase support can then be washed with the buffer a second time to remove unbound antibody. The amount of bound label on the solid support can then be detected by conventional means.

[0300] The invention also encompasses kits for detecting the presence of a marker protein or nucleic acid in a biological sample (e.g. an colon-associated body fluid such as a urine sample). Such kits can be used to determine if a subject is suffering from or is at increased risk of developing colon cancer. For example, the kit can comprise a labeled compound or agent capable of detecting a marker protein or nucleic acid in a biological sample and means for determining the amount of the protein or mRNA in the sample (e.g., an antibody which binds the protein or a fragment thereof, or an oligonucleotide probe which binds to DNA or mRNA encoding the protein). Kits can also include instructions for interpreting the results obtained using the kit.

[0301] For antibody-based kits, the kit can comprise, for example: (1) a first antibody (e.g., attached to a solid support) which binds to a marker protein; and, optionally, (2) a second, different antibody which binds to either the protein or the first antibody and is conjugated to a detectable label.

[0302] For oligonucleotide-based kits, the kit can comprise, for example: (1) an oligonucleotide, e.g., a detectably labeled oligonucleotide, which hybridizes to a nucleic acid sequence encoding a marker protein or (2) a pair of primers useful for amplifying a marker nucleic acid molecule. The kit can also comprise, e.g., a buffering agent, a preservative, or a protein stabilizing agent. The kit can further comprise components necessary for detecting the detectable label (e.g., an enzyme or a substrate). The kit can also contain a control sample or a series of control samples which can be assayed and compared to the test sample. Each component of the kit can be enclosed within an individual container and all of the various containers can be within a single package, along with instructions for interpreting the results of the assays performed using the kit.

[0303] B. Pharmacogenomics

[0304] The markers of the invention are also useful as pharmacogenomic markers. As used herein, a “pharmacogenomic marker” is an objective biochemical marker whose expression level correlates with a specific clinical drug response or susceptibility in a patient (see, e.g., McLeod et al. (1999) Eur. J. Cancer 35(12): 1650-1652). The presence or quantity of the pharmacogenomic marker expression is related to the predicted response of the patient and more particularly the patient's tumor to therapy with a specific drug or class of drugs. By assessing the presence or quantity of the expression of one or more pharmacogenomic markers in a patient, a drug therapy which is most appropriate for the patient, or which is predicted to have a greater degree of success, may be selected. For example, based on the presence or quantity of RNA or protein encoded by specific tumor markers in a patient, a drug or course of treatment may be selected that is optimized for the treatment of the specific tumor likely to be present in the patient. The use of pharmacogenomic markers therefore permits selecting or designing the most appropriate treatment for each cancer patient without trying different drugs or regimes.

[0305] Another aspect of pharmacogenomics deals with genetic conditions that alters the way the body acts on drugs. These pharmacogenetic conditions can occur either as rare defects or as polymorphisms. For example, glucose-6-phosphate dehydrogenase (G6PD) deficiency is a common inherited enzymopathy in which the main clinical complication is hemolysis after ingestion of oxidant drugs (anti-malarials, sulfonamides, analgesics, nitrofurans) and consumption of fava beans.

[0306] As an illustrative embodiment, the activity of drug metabolizing enzymes is a major determinant of both the intensity and duration of drug action. The discovery of genetic polymorphisms of drug metabolizing enzymes (e.g., N-acetyltransferase 2 (NAT 2) and cytochrome P450 enzymes CYP2D6 and CYP2C19) has provided an explanation as to why some patients do not obtain the expected drug effects or show exaggerated drug response and serious toxicity after taking the standard and safe dose of a drug. These polymorphisms are expressed in two phenotypes in the population, the extensive metabolizer (EM) and poor metabolizer (PM). The prevalence of PM is different among different populations. For example, the gene coding for CYP2D6 is highly polymorphic and several mutations have been identified in PM, which all lead to the absence of functional CYP2D6. Poor metabolizers of CYP2D6 and CYP2C19 quite frequently experience exaggerated drug response and side effects when they receive standard doses. If a metabolite is the active therapeutic moiety, a PM will show no therapeutic response, as demonstrated for the analgesic effect of codeine mediated by its CYP2D6-formed metabolite morphine. The other extreme are the so called ultra-rapid metabolizers who do not respond to standard doses. Recently, the molecular basis of ultra-rapid metabolism has been identified to be due to CYP2D6 gene amplification.

[0307] Thus, the level of expression of a marker of the invention in an individual can be determined to thereby select appropriate agent(s) for therapeutic or prophylactic treatment of the individual. In addition, pharmacogenetic studies can be used to apply genotyping of polymorphic alleles encoding drug-metabolizing enzymes to the identification of an individual's drug responsiveness phenotype. This knowledge, when applied to dosing or drug selection, can avoid adverse reactions or therapeutic failure and thus enhance therapeutic or prophylactic efficiency when treating a subject with a modulator of expression of a marker of the invention.

[0308] C. Monitoring Clinical Trials

[0309] Monitoring the influence of agents (e.g., drug compounds) on the level of expression of a marker of the invention can be applied not only in basic drug screening, but also in clinical trials. For example, the effectiveness of an agent to affect marker expression can be monitored in clinical trials of subjects receiving treatment for colon cancer. In a preferred embodiment, the present invention provides a method for monitoring the effectiveness of treatment of a subject with an agent (e.g., an agonist, antagonist, peptidomimetic, protein, peptide, nucleic acid, small molecule, or other drug candidate) comprising the steps of (i) obtaining a pre-administration sample from a subject prior to administration of the agent; (ii) detecting the level of expression of one or more selected markers of the invention in the pre-administration sample; (iii) obtaining one or more post-administration samples from the subject; (iv) detecting the level of expression of the marker(s) in the post-administration samples; (v) comparing the level of expression of the marker(s) in the pre-administration sample with the level of expression of the marker(s) in the post-administration sample or samples; and (vi) altering the administration of the agent to the subject accordingly. For example, increased expression of the marker gene(s) during the course of treatment may indicate ineffective dosage and the desirability of increasing the dosage. Conversely, decreased expression of the marker gene(s) may indicate efficacious treatment and no need to change dosage.

[0310] D. Electronic Apparatus Readable Media and Arrays

[0311] Electronic apparatus readable media comprising a marker of the present invention is also provided. As used herein, “electronic apparatus readable media” refers to any suitable medium for storing, holding or containing data or information that can be read and accessed directly by an electronic apparatus. Such media can include, but are not limited to: magnetic storage media, such as floppy discs, hard disc storage medium, and magnetic tape; optical storage media such as compact disc; electronic storage media such as RAM, ROM, EPROM, EEPROM and the like; general hard disks and hybrids of these categories such as magnetic/optical storage media. The medium is adapted or configured for having recorded thereon a marker of the present invention.

[0312] As used herein, the term “electronic apparatus” is intended to include any suitable computing or processing apparatus or other device configured or adapted for storing data or information. Examples of electronic apparatus suitable for use with the present invention include stand-alone computing apparatus; networks, including a local area network (LAN), a wide area network (WAN) Internet, Intranet, and Extranet; electronic appliances such as a personal digital assistants (PDAs), cellular phone, pager and the like; and local and distributed processing systems.

[0313] As used herein, “recorded” refers to a process for storing or encoding information on the electronic apparatus readable medium. Those skilled in the art can readily adopt any of the presently known methods for recording information on known media to generate manufactures comprising the markers of the present invention.

[0314] A variety of software programs and formats can be used to store the marker information of the present invention on the electronic apparatus readable medium. For example, the marker nucleic acid sequence can be represented in a word processing text file, formatted in commercially-available software such as WordPerfect and MicroSoft Word, or represented in the form of an ASCII file, stored in a database application, such as DB2, Sybase, Oracle, or the like, as well as in other forms. Any number of data processor structuring formats (e.g., text file or database) may be employed in order to obtain or create a medium having recorded thereon the markers of the present invention.

[0315] By providing the markers of the invention in readable form, one can routinely access the marker sequence information for a variety of purposes. For example, one skilled in the art can use the nucleotide or amino acid sequences of the present invention in readable form to compare a target sequence or target structural motif with the sequence information stored within the data storage means. Search means are used to identify fragments or regions of the sequences of the invention which match a particular target sequence or target motif.

[0316] The present invention therefore provides a medium for holding instructions for performing a method for determining whether a subject has colon cancer or a pre-disposition to colon cancer, wherein the method comprises the steps of determining the presence or absence of a marker and based on the presence or absence of the marker, determining whether the subject has colon cancer or a pre-disposition to colon cancer and/or recommending a particular treatment for colon cancer or pre-colon cancer condition.

[0317] The present invention further provides in an electronic system and/or in a network, a method for determining whether a subject has colon cancer or a pre-disposition to colon cancer associated with a marker wherein the method comprises the steps of determining the presence or absence of the marker, and based on the presence or absence of the marker, determining whether the subject has colon cancer or a pre-disposition to colon cancer, and/or recommending a particular treatment for the colon cancer or pre-colon cancer condition. The method may further comprise the step of receiving phenotypic information associated with the subject and/or acquiring from a network phenotypic information associated with the subject.

[0318] The present invention also provides in a network, a method for determining whether a subject has colon cancer or a pre-disposition to colon cancer associated with a marker, said method comprising the steps of receiving information associated with the marker receiving phenotypic information associated with the subject, acquiring information from the network corresponding to the marker and/or colon cancer, and based on one or more of the phenotypic information, the marker, and the acquired information, determining whether the subject has a colon cancer or a pre-disposition to colon cancer. The method may further comprise the step of recommending a particular treatment for the colon cancer or pre-colon cancer condition.

[0319] The present invention also provides a business method for determining whether a subject has colon cancer or a pre-disposition to colon cancer, said method comprising the steps of receiving information associated with the marker, receiving phenotypic information associated with the subject, acquiring information from the network corresponding to the marker and/or colon cancer, and based on one or more of the phenotypic information, the marker, and the acquired information, determining whether the subject has colon cancer or a pre-disposition to colon cancer. The method may further comprise the step of recommending a particular treatment for the colon cancer or pre-colon cancer condition.

[0320] The invention also includes an array comprising a marker of the present invention. The array can be used to assay expression of one or more genes in the array. In one embodiment, the array can be used to assay gene expression in a tissue to ascertain tissue specificity of genes in the array. In this manner, up to about 7600 genes can be simultaneously assayed for expression. This allows a profile to be developed showing a battery of genes specifically expressed in one or more tissues.

[0321] In addition to such qualitative determination, the invention allows the quantitation of gene expression. Thus, not only tissue specificity, but also the level of expression of a battery of genes in the tissue is ascertainable. Thus, genes can be grouped on the basis of their tissue expression per se and level of expression in that tissue. This is useful, for example, in ascertaining the relationship of gene expression between or among tissues. Thus, one tissue can be perturbed and the effect on gene expression in a second tissue can be determined. In this context, the effect of one cell type on another cell type in response to a biological stimulus can be determined. Such a determination is useful, for example, to know the effect of cell-cell interaction at the level of gene expression. If an agent is administered therapeutically to treat one cell type but has an undesirable effect on another cell type, the invention provides an assay to determine the molecular basis of the undesirable effect and thus provides the opportunity to co-administer a counteracting agent or otherwise treat the undesired effect. Similarly, even within a single cell type, undesirable biological effects can be determined at the molecular level. Thus, the effects of an agent on expression of other than the target gene can be ascertained and counteracted.

[0322] In another embodiment, the array can be used to monitor the time course of expression of one or more genes in the array. This can occur in various biological contexts, as disclosed herein, for example development of colon cancer, progression of colon cancer, and processes, such a cellular transformation associated with colon cancer.

[0323] The array is also useful for ascertaining the effect of the expression of a gene on the expression of other genes in the same cell or in different cells. This provides, for example, for a selection of alternate molecular targets for therapeutic intervention if the ultimate or downstream target cannot be regulated.

[0324] The array is also useful for ascertaining differential expression patterns of one or more genes in normal and abnormal cells. This provides a battery of genes that could serve as a molecular target for diagnosis or therapeutic intervention.

[0325] E. Surrogate Markers

[0326] The markers of the invention may serve as surrogate markers for one or more disorders or disease states or for conditions leading up to disease states, and in particular, colon cancer. As used herein, a “surrogate marker” is an objective biochemical marker which correlates with the absence or presence of a disease or disorder, or with the progression of a disease or disorder (e.g., with the presence or absence of a tumor). The presence or quantity of such markers is independent of the disease. Therefore, these markers may serve to indicate whether a particular course of treatment is effective in lessening a disease state or disorder. Surrogate markers are of particular use when the presence or extent of a disease state or disorder is difficult to assess through standard methodologies (e.g., early stage tumors), or when an assessment of disease progression is desired before a potentially dangerous clinical endpoint is reached (e.g., an assessment of cardiovascular disease may be made using cholesterol levels as a surrogate marker, and an analysis of HIV infection may be made using HIV RNA levels as a surrogate marker, well in advance of the undesirable clinical outcomes of myocardial infarction or fully-developed AIDS). Examples of the use of surrogate markers in the art include: Koomen et al. (2000) J. Mass. Spectrom. 35: 258-264; and James (1994) AIDS Treatment News Archive 209.

[0327] The markers of the invention are also useful as pharmacodynamic markers. As used herein, a “pharmacodynamic marker” is an objective biochemical marker which correlates specifically with drug effects. The presence or quantity of a pharmacodynamic marker is not related to the disease state or disorder for which the drug is being administered; therefore, the presence or quantity of the marker is indicative of the presence or activity of the drug in a subject. For example, a pharmacodynamic marker may be indicative of the concentration of the drug in a biological tissue, in that the marker is either expressed or transcribed or not expressed or transcribed in that tissue in relationship to the level of the drug. In this fashion, the distribution or uptake of the drug may be monitored by the pharmacodynamic marker. Similarly, the presence or quantity of the pharmacodynamic marker may be related to the presence or quantity of the metabolic product of a drug, such that the presence or quantity of the marker is indicative of the relative breakdown rate of the drug in vivo. Pharmacodynamic markers are of particular use in increasing the sensitivity of detection of drug effects, particularly when the drug is administered in low doses. Since even a small amount of a drug may be sufficient to activate multiple rounds of marker transcription or expression, the amplified marker may be in a quantity which is more readily detectable than the drug itself. Also, the marker may be more easily detected due to the nature of the marker itself; for example, using the methods described herein, antibodies may be employed in an immune-based detection system for a protein marker, or marker-specific radiolabeled probes may be used to detect a mRNA marker. Furthermore, the use of a pharmacodynamic marker may offer mechanism-based prediction of risk due to drug treatment beyond the range of possible direct observations. Examples of the use of pharmacodynamic markers in the art include: Matsuda et al. U.S. Pat. No. 6,033,862; Hattis et al. (1991) Env. Health Perspect. 90: 229-238; Schentag (1999) Am. J. Health-Syst. Pharm. 56 Suppl. 3: S21-S24; and Nicolau (1999) Am, J. Health-Syst. Phann. 56 Suppl. 3: S16-S20.

[0328] VI. Experimental Protocol

[0329] A. Identification of Markers and Assembly of Their Sequences

[0330] The markers of the present invention were identified by transcription profiling using RNA derived from 21 normal colon samples, 4 adenomatous polyps, and 25 colon cancer samples including 5 of each from the following categories:

[0331] Group 1: Duke's stage A or B tumors from the proximal colon exhibiting microsatellite instability.

[0332] Group 2: Duke's stage A or B tumors from the proximal colon not exhibiting microsatellite instability.

[0333] Group 3: Duke's stage A or B tumors from the distal colon not exhibiting microsatellite instability.

[0334] Group 4: Duke's stage D tumors from the distal colon not exhibiting microsatellite instability.

[0335] Group 5: Tumors from the distal colon of patients 46 years of age and younger (early onset tumors).

[0336] Frozen tissue blocks were sectioned and RNA isolated from these samples. The integrity of the RNA was evaluated, and degraded samples were not used for the experiments.

[0337] The markers of Table 1 were selected by transcriptional profiling with nylon arrays of 44,200 clones, including 30,000 IMAGE clones, 14,000 clones from cDNA libraries generated at Millennium Pharmaceuticals, Inc., and 200 control genes. RNA samples derived from normal colon, adenomatous polyps, and colon tumors were used to prepare 33P-labeled cDNA probes. The labeled probes were hybridized onto nylon membrane arrays. Clones that displayed an increase in expression in at least 2 colon polyps or at least 4 tumor specimens over the corresponding average expression of normal colon samples were selected to have their protein-encoding transcript sequences determined.

[0338] The clusters in which the selected clones belong, were blasted against both public and proprietary sequence databases in order to identify other EST sequences or clusters with significant overlap. Thus, contiguous EST sequences and/or clusters were assembled into protein-encoding transcripts. An identification of protein sequence within each transcript was accomplished by obtaining one of the following:

[0339] a) a direct match between the protein sequence and at least one EST sequence in one of its 6 possible translations;

[0340] b) a direct match between the nucleotide sequence for the mRNA corresponding to the protein sequence and at least one EST sequence;

[0341] c) a match between the protein sequence and a contiguous assembly (contig) of the EST sequences with other available EST sequences in the databases in one of its 6 possible translations;

[0342] d) a match between the nucleotide sequence for the mRNA corresponding to the protein sequence and a contiguous assembly of the EST sequences with other available EST sequences in the databases in one of its 6 possible translations.

[0343] VII. Summary of the Data Provided in the Tables

[0344] Tables 1-3 list the markers obtained using the foregoing protocol. The Tables list the markers which are designated with a name (“Marker”), the name the gene is commonly known by, if applicable (“Gene Name”), the Sequence Listing identifier of the cDNA sequence of a nucleotide transcript encoded by or corresponding to the marker (“SEQ ID NO (nts)”), the Sequence Listing identifier of the amino acid sequence of a protein encoded by the nucleotide transcript (“SEQ ID NO (AAs)”), and the location of the protein coding sequence within the cDNA sequence (“CDS”).

[0345] Table 1 lists all of the markers of the invention, which are over-expressed in colon cancer cells compared to normal (i.e., non-cancerous) colon cells and comprises markers listed in Tables 2 and 3. Table 2 lists newly-identified nucleotide and amino acid sequences useful as colon cancer markers. Table 3 lists newly-identified nucleic acid sequences useful as colon cancer markers.

[0346] The markers obtained using the foregoing protocol should not be construed as limiting. The contents of all references, databases, patents and published patent applications cited throughout this application are expressly incorporated herein by reference.

[0347] Other Embodiments

[0348] Those skilled in the art will recognize, or be able to ascertain using no more than routine experimentation, many equivalents to the specific embodiments of the invention described herein. Such equivalents are intended to be encompassed by the following claims:

What is claimed:

1. An isolated nucleic acid molecule comprising a nucleotide sequence of SEQ ID NOS: 1, 3, 25, 38, 56, 102, 104, 106, 135, 156, 158, 164, 166, 190, 218, 219, 225 or 227.

2. A vector which contains the nucleic acid molecule of claim 1.

3. A host cell which contains the nucleic acid molecule of claim 1.

4. A method of assessing whether a patient is afflicted with colon cancer, the method comprising:
a) determining the level of expression of a marker in a patient sample, wherein the marker is selected from the group consisting of the markers of Table 1; and
b) determining the normal level of expression of the marker in a control non-colon cancer sample,
wherein a significant increase in the level of expression of the marker in the patient sample compared to the level of expression of the marker in the control sample is an indication that the patient is afflicted with colon cancer.

5. An isolated polypeptide comprising the amino acid sequence of SEQ ID NOS: 4, 103, 134, 136, 157, 220, 226 or 228.

The application's sequence listing, which the Patent Office published only in electronic form, follows.

SEQUENCE LISTING (228 sequences)

SEQ ID NO: 1 - DNA, 5993 bp, Homo Sapiens
  CDS (307)...(3036)
cactaacgctcttcctagtccccgggccaactcggacagtttgctcatttattgcaacggtcaaggctggcttgtgccagaacggcgcgcgcgcgacgcacgcacacacacggggggaaacttttttaaaaatgaaaggctagaagagctcagcggcggcgcgggccgtgcgcgagggctccggagctgactcgccgaggcaggaaatccctccggtcgcgacgcccggccccgctcggcgcccgcgtgggatggtgcagcgctcgccgccgggcccgagagctgctgcactgaaggccggcgacgatggcagcgcgcccgctgcccgtgtcccccgcccgcgccctcctgctcgccctggccggtgctctgctcgcgccctgcgaggcccgaggggtgagcttatggaaccaaggaagagctgatgaagttgtcagtgcctctgttcggagtggggacctctggatcccagtgaagagcttcgactccaagaatcatccagaagtgctgaatattcgactacaacgggaaagcaaagaactgatcataaatctggaaagaaatgaaggtctcattgccagcagtttcacggaaacccactatctgcaagacggtactgatgtctccctcgctcgaaattacacggtaattctgggtcactgttactaccatggacatgtacggggatattctgattcagcagtcagtctcagcacgtgttctggtctcaggggacttattgtgtttgaaaatgaaagctatgtcttagaaccaatgaaaagtgcaaccaacagatacaaactcttcccagcgaagaagctgaaaagcgtccggggatcatgtggatcacatcacaacacaccaaacctcgctgcaaagaatgtgtttccaccaccctctcagacatgggcaagaaggcataaaagagagaccctcaaggcaactaagtatgtggagctggtgatcgtggcagacaaccgagagtttcagaggcaaggaaaagatctggaaaaagttaagcagcgattaatagagattgctaatcacgttgacaagttttacagaccactgaacattcggatcgtgttggtaggcgtggaagtgtggaatgacatggacaaatgctctgtaagtcaggacccattcaccagcctccatgaatttctggactggaggaagatgaagcttctacctcgcaaatcccatgacaatgcgcagcttgtcagtggggtttatttccaagggaccaccatcggcatggccccaatcatgagcatgtgcacggcagaccagtctgggggaattgtcatggaccattcagacaatccccttggtgcagccgtgaccctggcacatgagctgggccacaatttcgggatgaatcatgacacactggacaggggctgtagctgtcaaatggcggttgagaaaggaggctgcatcatgaacgcttccaccgggtacccatttcccatggtgttcagcagttgcagcaggaaggacttggagaccagcctggagaaaggaatgggggtgtgcctgtttaacctgccggaagtcagggagtctttcgggggccagaagtgtgggaacagatttgtggaagaaggagaggagtgtgactgtggggagccagaggaatgtatgaatcgctgctgcaatgccaccacctgtaccctgaagccggacgctgtgtgcgcacatgggctgtgctgtgaagactgccagctgaagcctgcaggaacagcgtgcagggactccagcaactcctgtgacctcccagagttctgcacaggggccagccctcactgcccagccaacgtgtacctgcacgatgggcactcatgtcaggatgtggacggctactgctacaatggcatctgccagactcacgagcagcagtgtgtcacactctggggaccaggtgctaaacctgcccctgggatctgctttgagagagtcaattctgcaggtgatccttatggcaactgtggcaaagtctcgaagagttcctttgccaaatgcgagatgagagatgctaaatgtggaaaaatccagtgtcaaggaggtgccagccggccagtcattggtaccaatgccgtttccatagaaacaaacatccccctgcagcaaggaggccggattctgtgccgggggacccacgtgtacttgggcgatgacatgccggacccagggcttgtgcttgcaggcacaaagtgtgcagatggaaaaatctgcctgaatcgtcaatgtcaaaatattagtgtctttggggttcacgagtgtgcaatgcagtgccacggcagaggggtgtgcaacaacaggaagaactgccactgcgaggcccactgggcacctcccttctgtgacaagtttggctttggaggaagcacagacagcggccccatccggcaagcagataaccaaggtttaaccataggaattctggtgaccatcctgtgtcttcttgctgccggatttgtggtttatctcaaaaggaagaccttgatacgactgctgtttacaaataagaagaccaccattgaaaaactaaggtgtgtgcgcccttcccggccaccccgtggcttccaaccctgtcaggctcacctcggccaccttggaaaaggcctgatgaggaagccgccagattcctacccaccgaaggacaatcccaggagattgctgcagtgtcagaatgttgacatcagcagacccctcaacggcctgaatgtccctcagccccagtcaactcagcgagtgcttcctcccctccaccgggccccacgtgcacctagcgtccctgccagacccctgccagccaagcctgcacttaggcaggcccaggggacctgtaagccaaacccccctcagaagcctctgcctgcagatcctctggccagaacaactcggctcactcatgccttggccaggaccccaggacaatgggagactgggctccgcctggcacccctcagacctgctccacaatatccacaccaagtgcccagatccacccacaccgcctatattaagtgagaagccgacaccttttttcaacagtgaagacagaagtttgcactatctttcagctccagttggagttttttgtaccaacttttaggattttttttaatgtttaaaacatcattactataagaactttgagctactgccgtcagtgctgtgctgtgctatggtgctctgtctacttgcacaggtacttgtaaattattaatttatgcagaatgttgattacagtgcagtgcgctgtagtaggcatttttaccatcactgagttttccatggcaggaaggcttgttgtgcttttagtattttagtgaacttgaaatatcctgcttgatgggattctggacaggatgtgtttgctttctgatcaaggccttattggaaagcagtcccccaactacccccagctgtgcttatggtaccagatgcagctcaagagatcccaagtagaatctcagttgattttctggattccccatctcaggccagagccaaggggcttcaggtccaggctgtgtttggctttcagggaggccctgtgccccttgacaactggcaggcaggctcccagggacacctgggagaaatctggcttctggccaggaagctttggtgagaacctgggttgcagacaggaatcttaaggtgtagccacaccaggatagagactggaacactagacaagccagaacttgaccctgagctgaccagccgtgagcatgtttggaaggggtctgtagtgtcactcaaggcggtgcttgatagaaatgccaagcacttctttttctcgctgtcctttctagagcactgccaccagtaggttatttagcttgggaaaggtggtgtttctgtaagaaacctactgcccaggcactgcaaaccgccacctccctatactgcttggagctgagcaaatcaccacaaactgtaatacaatgatcctgtattcagacagatgaggactttccatgggaccacaactattttcagatgtgaaccattaaccagatctagtcaatcaagtctgtttactgcaaggttcaacttattaacaattaggcagactctttatgcttgcaaaaactacaaccaatggaatgtgatgttcatgggtatagttcatgtctgctatcattattcgtagatattggacaaagaaccttctctatggggcatcctctttttccaacttggctgcaggaatctttaaaagatgcttttaacagagtctgaacctatttcttaaacacttgcaacctacctgttgagcatcacagaatgtgataaggaaatcaacttgcttatcaacttcctaaatattatgagatgtggcttgggcagcatccccttgaactcttcactcttcaaatgcctgactagggagccatgtttcacaaggtctttaaagtgactaatggcatgagaaatacaaaaatactcagataaggtaaaatgccatgatgcctctgtcttctggactggttttcacattagaagacaattgacaacagttacataattcactctgagtgttttatgagaaagccttcttttggggtcaacagttttcctatgctttgaaacagaaaaatatgtaccaagaatcttggtttgccttccagaaaacaaaactgcatttcactttcccggtgttccccactgtatctaggcaacatagtattcatgactatggataaactaaacacgtgacacaaacacacacaaaagggaacccagctctaatacattccaactcgtatagcatgcatctgtttattctatagttattaagttctttaaaatgtaaagccatgctggaaaataatactgctgagatacatacagaattactgtaactgattacacttggtaattgtactaaagccaaacatatatatactattaaaaaggtttacagaattttatggtgcattacgtgggcattgtctttttagatgcccaaatccttagatctggcatgttagcccttcctccaattataagaggatatgaactgagtttttcttttgttgtttgttcttagctgtaattcctatgcttctatttcagagagccaggagagtttgatattaaaggaggttaaaactgtgatcttatgccatgtcatcaatggccacttaggggccatggctgatgacacattcttatctctacagtactaatgtgttattatagagccatgcattttatttctgaataagaacatatttaaactaatattcccttacaatatggacagtattaatccttccaagatgcagtatttatcaagtgaagcatatttagcagcaaattccattttaacataacttaggaaccaataaccagggtgttttgtggttgggggaggcacggggtggagtattcttttttatatcctcaaaacaaaaaaaatcaatacttatatttcaatggcaatctagtatttttttaaaagactgtataggcatgaataatagaggtggtttgagttttgtagggccatcacctggaaagtcaatgtgactagacacaaagtagcccagaggctacttttcttcctacagcttattatagttgtaggttctatgacctcacttcatgggttccaggcaattccgctgaaaggtttgtctcctgaaattttttaagtttgttttcctgaccacatgtaatcagatgtgtagcaaccgagggaaacgaagcctaacattctccattgtggaaatacacaccaggaggttacacttcacagcgtggatttttccagcttacacatgtgggatgacatcacagaaaccacaaaagcagcaaattaaactgtaggagagtcaatactcctgacgagtctcggggggggcatttttatgccttcttaactttatgagaattctcaggctgaactataggccattgttcccaggcaaatcaatacatcaatgcatcctcaaaaaaaaaaaaaaaaa

SEQ ID NO: 2 - protein, 909 aa, Homo Sapiens
MAARPLPVSPARALLLALAGALLAPCEARGVSLWNQGRADEVVSASVRSGDLWIPVKSFDSKNHPEVLNIRLQRESKELIINLERNEGLIASSFTETHYLQDGTDVSLARNYTVILGHCYYHGHVRGYSDSAVSLSTCSGLRGLIVFENESYVLEPMKSATNRYKLFPAKKLKSVRGSCGSHHNTPNLAAKNVFPPPSQTWARRHKRETLKATKYVELVIVADNREFQRQGKDLEKVKQRLIEIANHVDKFYRPLNIRIVLVGVEVWNDMDKCSVSQDPFTSLHEFLDWRKMKLLPRKSHDNAQLVSGVYFQGTTIGMAPIMSMCTADQSGGIVMDHSDNPLGAAVTLAHELGHNFGMNHDTLDRGCSCQMAVEKGGCIMNASTGYPFPMVFSSCSRKDLETSLEKGMGVCLFNLPEVRESFGGQKCGNRFVEEGEECDCGEPEECMNRCCNATTCTLKPDAVCAHGLCCEDCQLKPAGTACRDSSNSCDLPEFCTGASPHCPANVYLHDGHSCQDVDGYCYNGICQTHEQQCVTLWGPGAKPAPGICFERVNSAGDPYGNCGKVSKSSFAKCEMRDAKCGKIQCQGGASRPVIGTNAVSIETNIPLQQGGRILCRGTHVYLGDDMPDPGLVLAGTKCADGKICLNRQCQNISVFGVHECAMQCHGRGVCNNRKNCHCEAHWAPPFCDKFGFGGSTDSGPIRQADNQGLTIGILVTILCLLAAGFVVYLKRKTLIRLLFTNKKTTIEKLRCVRPSRPPRGFQPCQAHLGHLGKGLMRKPPDSYPPKDNPRRLLQCQNVDISRPLNGLNVPQPQSTQRVLPPLHRAPRAPSVPARPLPAKPALRQAQGTCKPNPPQKPLPADPLARTTRLTHALARTPGQWETGLRLAPLRPAPQYPHQVPRSTHTAYIK

SEQ ID NO: 3 - DNA, 6691 bp, Homo Sapiens
  CDS (82)...(3717)
gccccagatgtgggctgggcggctcgcggggaactttcgcgccggctgcgagtgcggggccccggctgcagtccggctgccatggatccgccggcgggagccgctcgccgcctgctctgccccgcgctgctgctgctgctgctgctgctgccgccgccgctcctgccgccgccgccgccgcccgcgaacgccaggctcgccgccgccgccgaccccccaggcgggcccctggggcacggagcggagcgcatcctggcggtgcccgtgcgcactgacgcccagggccgcttggtgtcccacgtggtgtcggcagctacgtccagagcaggggtacgagcccgcagggccgccccggtccggaccccgagcttccccggaggcaacgaggaggagcctggcagtcacctcttctacaatgtcacggtctttggccgagacctgcacctgcggctgcggcccaacgcccgcctcgtggcgcccggggccactatggagtggcagggcgagaagggcaccacccgcgtggagcccctgctcgggagctgtctctacgtcggagacgtggccggcctagccgaagcctcctctgtggcgctcagcaactgcgatgggctggctggtctgatccggatggaggaggaggagttcttcatcgaacccttggagaaggggctggcggcgcaggaggctgagcaaggccgtgtgcatgtggtgtatcgccggccacccacgtcccctcctctcggggggccacaggccctggacacaggggcctccctggacagcctggacagcctcagccgcgccctgggcgtcctagaggagcacgccaacagctcgaggcggagggcacgcaggcatgctgcagacgatgactacaacatcgaggtcctgctgggcgtggatgactctgtggtgcagttccacgggaaggagcacgtacagaagtacctgctgacactcatgaacattgtcaatgaaatctaccatgacgagtccttgggtgcccacatcaacgtggtcctggtgcggatcatcctcctgagctatggaaagtccatgagcctcatcgagatcgggaacccctctcagagcctggagaatgtctgccgctgggcctacctccagcagaagccagacacgggccacgatgaataccacgatcacgccatcttcctcacacggcaggactttgggccttccggcatgcaaggctatgctcctgtcaccggcatgtgccatccggtccgcagctgcaccctgaaccatgaggacggcttctcctcagcgtttgtggtggcccatgagactggccacgtgctgggcatggagcacgacgggcagggcaaccgctgtggcgacgaggtgcggctgggcagcatcatggcgcccctggtgcaggccgccttccaccgcttccactggtcccgctgcagccagcaggagctgagccgctacctgcactcctatgactgcctgctggatgaccccttcgcccacgactggccggcgctgccccagctcccgggactgcactactccatgaacgagcaatgccgctttgacttcggcctgggctacatgatgtgcacggcgttccggacctttgacccctgcaagcagctgtggtgcagccatcctgacaacccctacttttgcaagaccaagaaggggccccccttggacgggactatgtgtgcacctggcaagcattgttttaaaggacactgcatctggctgacacctgacatcctcaaacgggacggcagctggggcgcttggagtccgtttggctcctgctcacgtacctgtggcacgggcgtgaagttcaggacccgccagtgtgacaacccacacccggccaacgggggccgcacctgctcgggccttgcctacgacttccagctctgcagccgccaggactgccccgactccctggctgacttccgcgaggagcagtgccgccagtgggacctgtacttcgagcacggcgacgcccagcaccactggctgccccacgagcaccgggatgccaaggagagatgccacctgtactgcgagtccagggagaccggggaggtggtgtccatgaagcgcatggtgcatgatgggacgcgctgctcctacaaggacgccttcagcctctgtgtgcgcggggactgcaggaaggtgggctgtgacggtgtgatcggctccagcaagcaggaagacaagtgtggcgtgtgcggaggggacaacagccactgcaaagtggtcaagggcacgttcacacggtcacccaagaagcatggttacatcaagatgtttgagatccctgcaggagccagacacctgctcattcaggaggtagacgccaccagccaccatctggccgtcaagaacctggagacaggcaagttcatcttaaatgaagagaatgacgtggatgccagttccaaaaccttcattgccatgggcgtggagtgggagtacagagacgaggacggccgggagacgctgcagaccatgggccccctccacggcaccatcaccgttctggtcatcccggtgggagacacccgggtctcactgacgtacaaatacatgatccatgaggactcactgaatgtcgatgacaacaacgtcctggaagaggactctgtggtctacgagtgggccctgaagaagtggtctccgtgctccaagccctgtggcggagggtcccagttcaccaagtatggctgccgccggaggctggaccacaagatggtacaccgtggcttctgtgccgccctctcgaagcccaaagccatccgcagagcgtgcaacccacaggaatgctcccagccagtgtgggtcacaggcgaatgggagccatgtagccagacctgtgggcggacaggcatgcaggtgcgctccgtgcgctgcattcagccgctacacgacaacaccacccgctccgtgcacgccaagcactgcaatgacgcccggcccgagagccgccgggcctgcagccgcgagctctgccctggtcgttggcgagccgggccctggtcccagtgctcagtaacctgtggcaacggcacccaggagcggccagtgctctgccgcaccgcggacgacagcttcggcatctgccaggaggagcgtcctgagacagcgaggacctgcaggcttggcccctgtccccgaaacatctcagatccctccaagaagagctacgtagttcagtggctgtcccgcccggaccccgactcgcccatccggaagatctcgtcaaagggccactgccaaggcgacaagtcaatattctgtaggatggaagtcttgtcccgctattgctccatcccaggctacaacaagctgtgctgcaagtcctgtaacctgtacaacaacctcaccaacgtggagggcaggatagagccaccgcctgggaagcacaacgacattgacgtgttcatgcctaccctcccagtgcccactgtagccatggaggtgcggccatcaccaagcacccccctggaggtccctctcaatgcctccagcaccaatgccacagaggatcacccagaaaccaatgccgtagatgaaccctacaaaatccatggcctggaagatgaagtccagccacccaacctaatccctcgacgaccgagcccctatgaaaagaccagaaaccaaagaatccaagagctcattgatgagatgcggaagaaagagatgctcggaaagttctaataaaatggaaagatagcatccctagcatttttttcttgcttatagagatattccatgggatagcaaatcctgtgtcatggagatgaagtcaaaattcctgattccaaaaggttttgagaaaacaaagagggggaatgacgtaagaaagatacgcatgagcatgtggtaagctaggttagcacgtgtgcttcccagcccaggagcgaccaaatactgtggtggcgtcaggtgtgcactggagaggaatatagaggctgtatggcctccctcactgagggcagggcaagagggatcactctacaaacaaaaataggccccaagttgctaagcagtgattgggaaccttcctttccttggcggagatgcatgacattccctaccgatccccagacacagcctgtgggactcttaggagaaatggtgatttactgaataactgacccgttgccgagatgagtacaatgaagtggaggtgatgaactcaaatcgtcttccagggccaggcggctgaccggggtgagcgtagtggcccgctggggaccatggccgccctgacagccacacccacctggagctgacttggttctggctgttgctgccactgtgaaatctgtatctctctccatctctgctctactatccccggccttgccagacagtgttctttttcggaagaagtctagatttttgcatgaaaaaaactcaatctttaaaggtcgactcagaacattttaaggaggcctccacttggtctgatgcagtcttgctaattaagaactaaaaggcttctgaccttcttggtgctcatgctgtacggcatctgaatgtctcgaccgagtctgagccgtgcagctgtcctccacctgcgaaagtaatgagaatcctatcacgggacataaggataggtctaaacagggtccatgccaagaaaacagtggggtgctctcccaggcctctcccctgtccactaaccctggccttgccggctgccttccaggctctgggggaagagctcctgcattcttccctggccaccttggctccagggctccccaagagcctcttccctccccaagtacctgagaaagatgagagaggcacgtgctctgctgggaaggtccagtgagcggttcaagggcctggaatctccctacggccaagtctaagggttctgggattctgggctttgtgggctttgcttgcttgctgggaatgggctttccctgtcccgcctgccccacttgctttgttttcagaagctccagaacccagcagtgactgcaaaatgtggcttgatgggggcttagggtgggagatggggagagctacattgtcttttgctccttgaaaactttaatagctcctattttccagagaatggtgctttgtgagcaacatgcgagtaagagagaaataggaggaagggggagtaggggcggatgggagaagagtggctcatttttacctctcactgcctgacattttgtgaacgtgaagcttaaactttctgggcttacaagacccaggggcacgtcagctccttagatgggctcagcctgacacataattcttaaacctttcctgtttaagaaacttctagaggctgtgtactctcaccaatcctcttcgagaatttgttcatgtgtatttccccattatatggatgaggctcaggataacagcatagtggctaccttctactgagttttgaggtgctaataagtatgtttgtctgaggctgcacatgtgggtggctctgtgtgtatgatccaagggacaaaatgacgatgtaggaaccagcaagaacggaatctgggctgatgcttcagtctccacctgggtgatggctagcctcccgccctccaccaccgcatcccacacgtgctgcgcactgtccccgtgtctcctggagaaccaaactggagaaaacctttctgagtatctctcatagtaccccttccttaagaagatgtggtttagagcatgtgtgcaatcctgcctctgtaattaggaaacggagcccgaggctttccattgttggttgaacccaggacagctggtgctattcacaggctgaagaactgggcagttcttacttgggtctgtcctaggatgtggaggaagttcaggactaacgctaggcagagagtatgactcggtttacccagcctaggggcctctggatgggaacactccattccaagatctcagcagagcagggcttcctggcttgaggctggaagcctttgggaagaggcccagctgggacattacctggcaccttcttcccgttgaagggagcaaggtgccctctgggatgacagccagacccttgtgccatcctcaatcttgagccatatatcaagagtcctctagagccggatggtcctcaaaagtctgtccaaggaatgccaacgttcaccgggcttgagaaacgacgcaaatctctgagctggggaccacttggagaaccggcttagtaacagtcctgatcttcgcaagccagttgttgtgcatctgaggggctcctggcgcccagaggaggcagacagatgtcttctagctgagtttctaaccgcatgatgagactcagaccttccgctgcactagaaaatctgcaacagtgtccstgagtcayttytccttagtgggcagactcgtgttagatttgtggaacccagctctctgatttactccttttggaaaacccatggaatttcatgtataaggctttcatttgtwttttaaggtttttctgtttgttttgagtatatacatggkgtgctcaatagcaacatcttagcagatgaagcagtttatgattccactccctcctgtatgacaggtagccactatactgaatcaaggtgctgaactcaaatcacaaaattctggcttaccgatacaacaaccaatacatctttgttctgtaataaaaaatttgactccttacttttataacttaaaaaaaaaa

SEQ ID NO: 4 - protein, 1211 aa, Homo Sapiens
MDPPAGAARRLLCPALLLLLLLLPPPLLPPPPPPANARLAAAADPPGGPLGHGAERILAVPVRTDAQGRLVSHVVSAATSRAGVRARRAAPVRTPSFPGGNEEEPGSHLFYNVTVFGRDLHLRLRPNARLVAPGATMEWQGEKGTTRVEPLLGSCLYVGDVAGLAEASSVALSNCDGLAGLIRMEEEEFFIEPLEKGLAAQEAEQGRVHVVYRRPPTSPPLGGPQALDTGASLDSLDSLSRALGVLEEHANSSRRRARRHAADDDYNIEVLLGVDDSVVQFHGKEHVQKYLLTLMNIVNEIYHDESLGAHINVVLVRIILLSYGKSMSLIEIGNPSQSLENVCRWAYLQQKPDTGHDEYHDHAIFLTRQDFGPSGMQGYAPVTGMCHPVRSCTLNHEDGFSSAFVVAHETGHVLGMEHDGQGNRCGDEVRLGSIMAPLVQAAFHRFHWSRCSQQELSRYLHSYDCLLDDPFAHDWPALPQLPGLHYSMNEQCRFDFGLGYMMCTAFRTFDPCKQLWCSHPDNPYFCKTKKGPPLDGTMCAPGKHCFKGHCIWLTPDILKRDGSWGAWSPFGSCSRTCGTGVKFRTRQCDNPHPANGGRTCSGLAYDFQLCSRQDCPDSLADFREEQCRQWDLYFEHGDAQHHWLPHEHRDAKERCHLYCESRETGEVVSMKRMVHDGTRCSYKDAFSLCVRGDCRKVGCDGVIGSSKQEDKCGVCGGDNSHCKVVKGTFTRSPKKHGYIKMFEIPAGARHLLIQEVDATSHHLAVKNLETGKFILNEENDVDASSKTFIAMGVEWEYRDEDGRETLQTMGPLHGTITVLVIPVGDTRVSLTYKYMIHEDSLNVDDNNVLEEDSVVYEWALKKWSPCSKPCGGGSQFTKYGCRRRLDHKMVHRGFCAALSKPKAIRRACNPQECSQPVWVTGEWEPCSQTCGRTGMQVRSVRCIQPLHDNTTRSVHAKHCNDARPESRRACSRELCPGRWRAGPWSQCSVTCGNGTQERPVLCRTADDSFGICQEERPETARTCRLGPCPRNISDPSKKSYVVQWLSRPDPDSPIRKISSKGHCQGDKSIFCRMEVLSRYCSIPGYNKLCCKSCNLYNNLTNVEGRIEPPPGKHNDIDVFMPTLPVPTVAMEVRPSPSTPLEVPLNASSTNATEDHPETNAVDEPYKIHGLEDEVQPPNLIPRRPSPYEKTRNQRIQELIDEMRKKEMLGKF

SEQ ID NO: 5 - DNA, 1156 bp, Homo Sapiens
  CDS (61)...(1014)
cgcagcggaggtgaaggacgtccttccccaggagccgactggccaatcacaggcaggaagatgaaggttctgtgggctgcgttgctggtcacattcctggcaggatgccaggccaaggtggagcaagcggtggagacagagccggagcccgagctgcgccagcagaccgagtggcagagcggccagcgctgggaactggcactgggtcgcttttgggattacctgcgctgggtgcagacactgtctgagcaggtgcaggaggagctgctcagctcccaggtcacccaggaactgagggcgctgatggacgagaccatgaaggagttgaaggcctacaaatcggaactggaggaacaactgaccccggtggcggaggagacgcgggcacggctgtccaaggagctgcaggcggcgcaggcccggctgggcgcggacatggaggacgtgtgcggccgcctggtgcagtaccgcggcgaggtgcaggccatgctcggccagagcaccgaggagctgcgggtgcgcctcgcctcccacctgcgcaagctgcgtaagcggctcctccgcgatgccgatgacctgcagaagcgcctggcagtgtaccaggccggggcccgcgagggcgccgagcgcggcctcagcgccatccgcgagcgcctggggcccctggtggaacagggccgcgtgcgggccgccactgtgggctccctggccggccagccgctacaggagcgggcccaggcctggggcgagcggctgcgcgcgcggatggaggagatgggcagccggacccgcgaccgcctggacgaggtgaaggagcaggtggcggaggtgcgcgccaagctggaggagcaggcccagcagatacgcctgcaggccgaggccttccaggcccgcctcaagagctggttcgagcccctggtggaagacatgcagcgccagtgggccgggctggtggagaaggtgcaggctgccgtgggcaccagcgccgcccctgtgcccagcgacaatcactgaacgccgaagcctgcagccatgcgaccccacgccaccccgtgcctcctgcctccgcgcagcctgcagcgggagaccctgtccccgccccagccgtcctcctggggtggaccctagtttaataaagattcaccaagtttcacgc

SEQ ID NO: 6 - protein, 317 aa, Homo Sapiens [sequence omitted]

SEQ ID NO: 7 - DNA, 1230 bp, Homo Sapiens
  CDS (210)...(968)
agacgttcgcacacctgggtgccagcgccccagaggtcccgggacagcccgaggcgccgcgcccgccgccccgagctccccaagccttcgagagcggcgcacactcccggtctccactcgctcttccaacacccgctcgttttgcggcagctcgtgtcccagagaccgagttgccccagagaccgagacgccgccgctgcgaaggaccaatgagagccccgctgctaccgccggcgccggtggtgctgtcgctcttgatactcggctcaggccattatgctgctggattggacctcaatgacacctactctgggaagcgtgaaccattttctggggaccacagtgctgatggatttgaggttacctcaagaagtgagatgtcttcagggagtgagatttcccctgtgagtgaaatgccttctagtagtgaaccgtcctcgggagccgactatgactactcagaagagtatgataacgaaccacaaatacctggctatattgtcgatgattcagtcagagttgaacaggtagttaagcccccccaaaacaagacggaaagtgaaaatacttcagataaacccaaaagaaagaaaaagggaggcaaaaatggaaaaaatagaagaaacagaaagaagaaaaatccatgtaatgcagaatttcaaaatttctgcattcacggagaatgcaaatatatagagcacctggaagcagtaacatgcaaatgtcagcaagaatatttcggtgaacggtgtggggaaaagtccatgaaaactcacagcatgattgacagtagtttatcaaaaattgcattagcagccatagctgcctttatgtctgctgtgatcctcacagctgttgctgttattacagtccagcttagaagacaatacgtcaggaaatatgaaggagaagctgaggaacgaaagaaacttcgacaagagaatggaaatgtacatgctatagcataactgaagataaaattacaggatatcacattggagtcactgccaagtcatagccataaatgatgagtcggtcctctttccagtggatcataagacaatggaccctttttgttatgatggttttaaactttcaattgtcactttttatgctatttctgtatataaaggtgcacgaaggtaaaaagtattttttcaagttgtaaataatttatttaatatttaatggaagtgtatttattttacagctcattaaacttttttaacc

SEQ ID NO: 8 - protein, 252 aa, Homo Sapiens
MRAPLLPPAPVVLSLLILGSGHYAAGLDLNDTYSGKREPFSGDHSADGFEVTSRSEMSSGSEISPVSEMPSSSEPSSGADYDYSEEYDNEPQIPGYIVDDSVRVEQVVKPPQNKTESENTSDKPKRKKKGGKNGKNRRNRKKKNPCNAEFQNFCIHGECKYIEHLEAVTCKCQQEYFGERCGEKSMKTHSMIDSSLSKIALAAIAAFMSAVILTAVAVITVQLRRQYVRKYEGEAEERKKLRQENGNVHAIA

SEQ ID NO: 9 - DNA, 1878 bp, Homo Sapiens
  CDS (123)...(1418)
gggcgcagcggggcccgtctgcagcaagtgaccgacggccgggacggccgcctgccccctctgccacctggggcggtgcgggcccggagcccggagcccgggtagcgcgtagagccggcgcgatgcacgtgcgctcactgcgagctgcggcgccgcacagcttcgtggcgctctgggcacccctgttcctgctgcgctccgccctggccgacttcagcctggacaacgaggtgcactcgagcttcatccaccggcgcctccgcagccaggagcggcgggagatgcagcgcgagatcctctccattttgggcttgccccaccgcccgcgcccgcacctccagggcaagcacaactcggcacccatgttcatgctggacctgtacaacgccatggcggtggaggagggcggcgggcccggcggccagggcttctcctacccctacaaggccgtcttcagtacccagggcccccctctggccagcctgcaagatagccatttcctcaccgacgccgacatggtcatgagcttcgtcaacctcgtggaacatgacaaggaattcttccacccacgctaccaccatcgagagttccggtttgatctttccaagatcccagaaggggaagctgtcacggcagccgaattccggatctacaaggactacatccgggaacgcttcgacaatgagacgttccggatcagcgtttatcaggtgctccaggagcacttgggcagggaatcggatctcttcctgctcgacagccgtaccctctgggcctcggaggagggctggctggtgtttgacatcacagccaccagcaaccactgggtggtcaatccgcggcacaacctgggcctgcagctctcggtggagacgctggatgggcagagcatcaaccccaagttggcgggcctgattgggcggcacgggccccagaacaagcagcccttcatggtggctttcttcaaggccacggaggtccacttccgcagcatccggtccacggggagcaaacagcgcagccagaaccgctccaagacgcccaagaaccaggaagccctgcggatggccaacgtggcagagaacagcagcagcgaccagaggcaggcctgtaagaagcacgagctgtatgtcagcttccgagacctgggctggcaggactggatcatcgcgcctgaaggctacgccgcctactactgtgagggggagtgtgccttccctctgaactcctacatgaacgccaccaaccacgccatcgtgcagacgctggtccacttcatcaacccggaaacggtgcccaagccctgctgtgcgcccacgcagctcaatgccatctccgtcctctacttcgatgacagctccaacgtcatcctgaagaaatacagaaacatggtggtccgggcctgtggctgccactagctcctccgagaattcagaccctttggggccaagtttttctggatcctccattgctcgccttggccaggaaccagcagaccaactgccttttgtgagaccttcccctccctatccccaactttaaaggtgtgagagtattaggaaacatgagcagcatatggcttttgatcagtttttcagtggcagcatccaatgaacaagatcctacaagctgtgcaggcaaaacctagcaggaaaaaaaaacaacgcataaagaaaaatggccgggccaggtcattggctgggaagtctcagccatgcacggactcgtttccagaggtaattatgagcgcctaccagccaggccacccagccgtgggaggaagggggcgtggcaaggggtgggcacattggtgtctgtgcgaaaggaaaattgacccggaagttcctgtaataaatgtcacaataaaacgaatgaatg

SEQ ID NO: 10 - protein, 431 aa, Homo Sapiens
MHVRSLRAAAPHSFVALWAPLFLLRSALADFSLDNEVHSSFIHRRLRSQERREMQREILSILGLPHRPRPHLQGKHNSAPMFMLDLYNAMAVEEGGGPGGQGFSYPYKAVFSTQGPPLASLQDSHFLTDADMVMSFVNLVEHDKEFFHPRYHHREFRFDLSKIPEGEAVTAAEFRIYKDYIRERFDNETFRISVYQVLQEHLGRESDLFLLDSRTLWASEEGWLVFDITATSNHWVVNPRHNLGLQLSVETLDGQSINPKLAGLIGRHGPQNKQPFMVAFFKATEVHFRSIRSTGSKQRSQNRSKTPKNQEALRMANVAENSSSDQRQACKKHELYVSFRDLGWQDWIIAPEGYAAYYCEGECAFPLNSYMNATNHAIVQTLVHFINPETVPKPCCAPTQLNAISVLYFDDSSNVILKKYRNMVVRACGCH

SEQ ID NO: 11 - DNA, 1552 bp, Homo Sapiens
  CDS (43)...(1422)
gcccgtacacaccgtgtgctgggacaccccacagtcagccgcatggctcccctgtgccccagcccctggctccctctgttgatcccggcccctgctccaggcctcactgtgcaactgctgctgtcactgctgcttctgatgcctgtccatccccagaggttgccccggatgcaggaggattcccccttgggaggaggctcttctggggaagatgacccactgggcgaggaggatctgcccagtgaagaggattcacccagagaggaggatccacccggagaggaggatctacctggagaggaggatctacctggagaggaggatctacctgaagttaagcctaaatcagaagaagagggctccctgaagttagaggatctacctactgttgaggctcctggagatcctcaagaaccccagaataatgcccacagggacaaagaaggggatgaccagagtcattggcgctatggaggcgacccgccctggccccgggtgtccccagcctgcgcgggccgcttccagtccccggtggatatccgcccccagctcgccgccttctgcccggccctgcgccccctggaactcctgggcttccagctcccgccgctcccagaactgcgcctgcgcaacaatggccacagtgtgcaactgaccctgcctcctgggctagagatggctctgggtcccgggcgggagtaccgggctctgcagctgcatctgcactggggggctgcaggtcgtccgggctcggagcacactgtggaaggccaccgtttccctgccgagatccacgtggttcacctcagcaccgcctttgccagagttgacgaggccttggggcgcccgggaggcctggccgtgttggccgcctttctggaggagggcccggaagaaaacagtgcctatgagcagttgctgtctcgcttggaagaaatcgctgaggaaggctcagagactcaggtcccaggactggacatatctgcactcctgccctctgacttcagccgctacttccaatatgaggggtctctgactacaccgccctgtgcccagggtgtcatctggactgtgtttaaccagacagtgatgctgagtgctaagcagctccacaccctctctgacaccctgtggggacctggtgactctcggctacagctgaacttccgagcgacgcagcctttgaatgggcgagtgattgaggcctccttccctgctggagtggacagcagtcctcgggctgctgagccagtccagctgaattcctgcctggctgctggtgacatcctagccctggtttttggcctcctttttgctgtcaccagcgtcgcgttccttgtgcagatgagaaggcagcacagaaggggaaccaaagggggtgtgagctaccgcccagcagaggtagccgagactggagcctagaggctggatcttggagaatgtgagaagccagccagaggcatctgagggggagccggtaactgtcctgtcctgctcattatgccacttccttttaactgccaagaaattttttaaaataaatatttataat

SEQ ID NO: 12 - protein, 459 aa, Homo Sapiens
MAPLCPSPWLPLLIPAPAPGLTVQLLLSLLLLMPVHPQRLPRMQEDSPLGGGSSGEDDPLGEEDLPSEEDSPREEDPPGEEDLPGEEDLPGEEDLPEVKPKSEEEGSLKLEDLPTVEAPGDPQEPQNNAHRDKEGDDQSHWRYGGDPPWPRVSPACAGRFQSPVDIRPQLAAFCPALRPLELLGFQLPPLPELRLRNNGHSVQLTLPPGLEMALGPGREYRALQLHLHWGAAGRPGSEHTVEGHRFPAEIHVVHLSTAFARVDEALGRPGGLAVLAAFLEEGPEENSAYEQLLSRLEEIAEEGSETQVPGLDISALLPSDFSRYFQYEGSLTTPPCAQGVIWTVFNQTVMLSAKQLHTLSDTLWGPGDSRLQLNFRATQPLNGRVIEASFPAGVDSSPRAAEPVQLNSCLAAGDILALVFGLLFAVTSVAFLVQMRRQHRRGTKGGVSYRPAEVAETGA

SEQ ID NO: 13 - DNA, 2824 bp, Homo Sapiens
  CDS (145)...(1497)
cccgagccccgcccctccgggcccgggtcggcgcgcccagcctgccagccgcgctgctgctgctcctcctgctgtgggaccgctgaccgcgcggctgctccgctctccccgctccaagcgccgatctgggcacccgccaccagcatggacgctcgccgcgtgccgcagaaagatctcagagtaaagaagaacttaaagaaattcagatatgtgaagttgatttccatggaaacctcgtcatcctctgatgacagttgtgacagctttgcttctgataattttgcaaacacgaaacctaaattcaggtcagatatcagtgaagaactggcaagtgttttttatgaggactctgataatgaatctttctgcggcttttcagaaagtgaggtgcaagatgtattagaccattgtggatttttacagaaaccaaggccagatgtcactaacgaactggccggtatttttcatgccgactctgacgatgaatcattttgcggtttctcagagagtgagatacaagatggaatgaggctgcagtcagttcgggaaggctgtaggacccgcagccagtgcaggcactctggacctctcagggtggcgatgaagtttccagcgcggagtaccaggggagcaaccaacaaaaaagcagagtcccgccagccctcagagaattctgtgactgattccaactccgattcagaagatgaaagtggaatgaattttttggagaaaagggctttaaatataaagcaaaacaaagcaatgcttgcaaaactcatgtctgaattagaaagcttccctggctcgttccgtggaagacatcccctcccaggctccgactcacaatcaaggagaccgcgaaggcgtacattcccgggtgttgcttccaggagaaaccctgaacggagagctcgtcctcttaccaggtcaaggtcccggatcctcgggtcccttgacgctctacccatggaggaggaggaggaagaggataagtacatgttggtgagaaagaggaagaccgtggatggctacatgaatgaagatgacctgcccagaagccgtcgctccagatcatccgtgacccttccgcatataattcgcccagtggaagaaattacagaggaggagttggagaacgtctgcagcaattctcgagagaagatatataaccgttcactgggctctacttgtcatcaatgccgtcagaagactattgataccaaaacaaactgcagaaacccagactgctggggcgttcgaggccagttctgtggcccctgccttcgaaaccgttatggtgaagaggtcagggatgctctgctggatccgaactggcattgcccgccttgtcgaggaatctgcaactgcagtttctgccggcagcgagatggacggtgtgcgactggggtccttgtgtatttagccaaatatcatggctttgggaatgtgcatgcctacttgaaaagcctgaaacaggaatttgaaatgcaagcataatatctggaaaatttgctgcctgccttctacttctcaaatctttcttgtaaaagtttccaattttttcactgaaacctgagttaaaaatcttgatgatcagcctgtttcataagaaactccaatcaagttaatcttagcagacatgtgtttctggagcatcacagaaggtatattgctagttacactttgccctcctgcagtttcttctctgctcccaacccccatctcatagcatccccctctatttccaatgctcctctccaaccgcttagtttctgaatttcttttaaattacagttttatgaaagcatattttatttacttggtgttgaaatagccctcataaaacctaagcacttggaaacacaataatagtattaactaactagatctattgaatttcagagaagagccttctaacttgtttacacaaaaacgagtatgatttagcattcatactagttgaaatttttaatagaatcaaggcacaaaagtcttaaaaccatgtggaaaaattaggtaattattgcagattgatgtctctcaatcccatgtattgcgcttatgttacaagttgttgtcacagttgagacttaatttctcctaatttcttctgcccgaagggtaagtggtgcgtccagcttacacaatcataattcaaaggttggtgggcaatgtaatacttaattaaaataatgatggaagagctatctggagattatgagtaagctgatttgaattttcagtataaaactttagtataattgtagtttgcaaagtttatttcagttcacatgtaaggtattgcaaataaattcttggacaattttgtatggaaacttgatattaaaaactagtctgtggttctttgcagtttcttgtaaatttataaaccaggcacaaggttcaagtttagattttaagcacttttataacaatgataagtgcctttttggagatgtaacttttagcagtttgttaacctgacatctctgccagtctagtttctgggcaggtttcctgtgtcagtattccccctcctctttgcattaatcaaggtatttggtagaggtggaatctaagtgtttgtatgtccaatttacttgcatatgtaaaccattgctgtgccattcaatgtttgatgcataattggaccttgaatcgataagtgtaaatacagcttttgatctgtaatgcttttatacaaaagtttattttaataataaaatgtttgttctaacttgtctgcttttttaaaaataatcttactgtacttaattctaattttttcctcatatttaaataaaaggccatttccaccttttct

SEQ ID NO: 14 - protein, 450 aa, Homo Sapiens
MDARRVPQKDLRVKKNLKKFRYVKLISMETSSSSDDSCDSFASDNFANTKPKFRSDISEELASVFYEDSDNESFCGFSESEVQDVLDHCGFLQKPRPDVTNELAGIFHADSDDESFCGFSESEIQDGMRLQSVREGCRTRSQCRHSGPLRVAMKFPARSTRGATNKKAESRQPSENSVTDSNSDSEDESGMNFLEKRALNIKQNKAMLAKLMSELESFPGSFRGRHPLPGSDSQSRRPRRRTFPGVASRRNPERRARPLTRSRSRILGSLDALPMEEEEEEDKYMLVRKRKTVDGYMNEDDLPRSRRSRSSVTLPHIIRPVEEITEEELENVCSNSREKIYNRSLGSTCHQCRQKTIDTKTNCRNPDCWGVRGQFCGPCLRNRYGEEVRDALLDPNWHCPPCRGICNCSFCRQRDGRCATGVLVYLAKYHGFGNVHAYLKSLKQEFEMQA

SEQ ID NO: 15 - DNA, 2587 bp, Homo Sapiens
  CDS (145)...(1260)
cccgagccccgcccctccgggcccgggtcggcgcgcccagcctgccagccgcgctgctgctgctcctcctgctgtgggaccgctgaccgcgcggctgctccgctctccccgctccaagcgccgatctgggcacccgccaccagcatggacgctcgccgcgtgccgcagaaagatctcagagtaaagaagaacttaaagaaattcagatatgtgaagttgatttccatggaaacctcgtcatcctctgatgacagttgtgacagctttgcttctgataattttgcaaacacgaggctgcagtcagttcgggaaggctgtaggacccgcagccagtgcaggcactctggacctctcagggtggcgatgaagtttccagcgcggagtaccaggggagcaaccaacaaaaaagcagagtcccgccagccctcagagaattctgtgactgattccaactccgattcagaagatgaaagtggaatgaattttttggagaaaagggctttaaatataaagcaaaacaaagcaatgcttgcaaaactcatgtctgaattagaaagcttccctggctcgttccgtggaagacatcccctcccaggctccgactcacaatcaaggagaccgcgaaggcgtacattcccgggtgttgcttccaggagaaaccctgaacggagagctcgtcctcttaccaggtcaaggtcccggatcctcgggtcccttgacgctctacccatggaggaggaggaggaagaggataagtacatgttggtgagaaagaggaagaccgtggatggctacatgaatgaagatgacctgcccagaagccgtcgctccagatcatccgtgacccttccgcatataattcgcccagtggaagaaattacagaggaggagttggagaacgtctgcagcaattctcgagagaagatatataaccgttcactgggctctacttgtcatcaatgccgtcagaagactattgataccaaaacaaactgcagaaacccagactgctggggcgttcgaggccagttctgtggcccctgccttcgaaaccgttatggtgaagaggtcagggatgctctgctggatccgaactggcattgcccgccttgtcgaggaatctgcaactgcagtttctgccggcagcgagatggacggtgtgcgactggggtccttgtgtatttagccaaatatcatggctttgggaatgtgcatgcctacttgaaaagcctgaaacaggaatttgaaatgcaagcataatatctggaaaatttgctgcctgccttctacttctcaaatctttcttgtaaaagtttccaattttttcactgaaacctgagttaaaaatcttgatgatcagcctgtttcataagaaactccaatcaagttaatcttagcagacatgtgtttctggagcatcacagaaggtatattgctagttacactttgccctcctgcagtttcttctctgctcccaacccccatctcatagcatccccctctatttccaatgctcctctccaaccgcttagtttctgaatttcttttaaattacagttttatgaaagcatattttatttacttggtgttgaaatagccctcataaaacctaagcacttggaaacacaataatagtattaactaactagatctattgaatttcagagaagagccttctaacttgtttacacaaaaacgagtatgatttagcattcatactagttgaaatttttaatagaatcaaggcacaaaagtcttaaaaccatgtggaaaaattaggtaattattgcagattgatgtctctcaatcccatgtattgcgcttatgttacaagttgttgtcacagttgagacttaatttctcctaatttcttctgcccgaagggtaagtggtgcgtccagcttacacaatcataattcaaaggttggtgggcaatgtaatacttaattaaaataatgatggaagagctatctggagattatgagtaagctgatttgaattttcagtataaaactttagtataattgtagtttgcaaagtttatttcagttcacatgtaaggtattgcaaataaattcttggacaattttgtatggaaacttgatattaaaaactagtctgtggttctttgcagtttcttgtaaatttataaaccaggcacaaggttcaagtttagattttaagcacttttataacaatgataagtgcctttttggagatgtaacttttagcagtttgttaacctgacatctctgccagtctagtttctgggcaggtttcctgtgtcagtattccccctcctctttgcattaatcaaggtatttggtagaggtggaatctaagtgtttgtatgtccaatttacttgcatatgtaaaccattgctgtgccattcaatgtttgatgcataattggaccttgaatcgataagtgtaaatacagcttttgatctgtaatgcttttatacaaaagtttattttaataataaaatgtttgttctaacttgtctgcttttttaaaaataatcttactgtacttaattctaattttttcctcatatttaaataaaaggccatttccaccttttct

SEQ ID NO: 16 - protein, 371 aa, Homo Sapiens
MDARRVPQKDLRVKKNLKKFRYVKLISMETSSSSDDSCDSFASDNFANTRLQSVREGCRTRSQCRHSGPLRVAMKFPARSTRGATNKKAESRQPSENSVTDSNSDSEDESGMNFLEKRALNIKQNKAMLAKLMSELESFPGSFRGRHPLPGSDSQSRRPRRRTFPGVASRRNPERRARPLTRSRSRILGSLDALPMEEEEEEDKYMLVRKRKTVDGYMNEDDLPRSRRSRSSVTLPHIIRPVEEITEEELENVCSNSREKIYNRSLGSTCHQCRQKTIDTKTNCRNPDCWGVRGQFCGPCLRNRYGEEVRDALLDPNWHCPPCRGICNCSFCRQRDGRCATGVLVYLAKYHGFGNVHAYLKSLKQEFEMQA

SEQ ID NO: 17 - DNA, 3205 bp, Homo Sapiens
  CDS (71)...(2560)
aaaggggcaagagctgagcggaacaccggcccgccgtcgcggcagctgcttcacccctctctctgcagccatggggctccctcgtggacctctcgcgtctctcctccttctccaggtttgctggctgcagtgcgcggcctccgagccgtgccgggcggtcttcagggaggctgaagtgaccttggaggcgggaggcgcggagcaggagcccggccaggcgctggggaaagtattcatgggctgccctgggcaagagccagctctgtttagcactgataatgatgacttcactgtgcggaatggcgagacagtccaggaaagaaggtcactgaaggaaaggaatccattgaagatcttcccatccaaacgtatcttacgaagacacaagagagattgggtggttgctccaatatctgtccctgaaaatggcaagggtcccttcccccagagactgaatcagctcaagtctaataaagatagagacaccaagattttctacagcatcacggggccgggggcagacagcccccctgagggtgtcttcgctgtagagaaggagacaggctggttgttgttgaataagccactggaccgggaggagattgccaagtatgagctctttggccacgctgtgtcagagaatggtgcctcagtggaggaccccatgaacatctccatcatcgtgaccgaccagaatgaccacaagcccaagtttacccaggacaccttccgagggagtgtcttagagggagtcctaccaggtacttctgtgatgcaggtgacagccacggatgaggatgatgccatctacacctacaatggggtggttgcttactccatccatagccaagaaccaaaggacccacacgacctcatgttcaccattcaccggagcacaggcaccatcagcgtcatctccagtggcctggaccgggaaaaagtccctgagtacacactgaccatccaggccacagacatggatggggacggctccaccaccacggcagtggcagtagtggagatccttgatgccaatgacaatgctcccatgtttgacccccagaagtacgaggcccatgtgcctgagaatgcagtgggccatgaggtgcagaggctgacggtcactgatctggacgcccccaactcaccagcgtggcgtgccacctaccttatcatgggcggtgacgacggggaccattttaccatcaccacccaccctgagagcaaccagggcatcctgacaaccaggaagggtttggattttgaggccaaaaaccagcacaccctgtacgttgaagtgaccaacgaggccccttttgtgctgaagctcccaacctccacagccaccatagtggtccacgtggaggatgtgaatgaggcacctgtgtttgtcccaccctccaaagtcgttgaggtccaggagggcatccccactggggagcctgtgtgtgtctacactgcagaagaccctgacaaggagaatcaaaagatcagctaccgcatcctgagagacccagcagggtggctagccatggacccagacagtgggcaggtcacagctgtgggcaccctcgaccgtgaggatgagcagtttgtgaggaacaacatctatgaagtcatggtcttggccatggacaatggaagccctcccaccactggcacgggaacccttctgctaacactgattgatgtcaatgaccatggcccagtccctgagccccgtcagatcaccatctgcaaccaaagccctgtgcgccaggtgctgaacatcacggacaaggacctgtctccccacacctcccctttccaggcccagctcacagatgactcagacatctactggacggcagaggtcaacgaggaaggtgacacagtggtcttgtccctgaagaagttcctgaagcaggatacatatgacgtgcacctttctctgtctgaccatggcaacaaagagcagctgacggtgatcagggccactgtgtgcgactgccatggccatgtcgaaacctgccctggaccctggaagggaggtttcatcctccctgtgctgggggctgtcctggctctgctgttcctcctgctggtgctgcttttgttggtgagaaagaagcggaagatcaaggagcccctcctactcccagaagatgacacccgtgacaacgtcttctactatggcgaagaggggggtggcgaagaggaccaggactatgacatcacccagctccaccgaggtctggaggccaggccggaggtggttctccgcaatgacgtggcaccaaccatcatcccgacacccatgtaccgtcctcggccagccaacccagatgaaatcggcaactttataattgagaacctgaaggcggctaacacagaccccacagccccgccctacgacaccctcttggtgttcgactatgagggcagcggctccgacgccgcgtccctgagctccctcacctcctccgcctccgaccaagaccaagattacgattatctgaacgagtggggcagccgcttcaagaagctggcagacatgtacggtggcggggaggacgactaggcggcctgcctgcagggctggggaccaaacgtcaggccacagagcatctccaaggggtctcagttcccccttcagctgaggacttcggagcttgtcaggaagtggccgtagcaacttggcggagacaggctatgagtctgacgttagagtggttgcttccttagcctttcaggatggaggaatgtgggcagtttgacttcagcactgaaaacctctccacctgggccagggttgcctcagaggccaagtttccagaagcctcttacctgccgtaaaatgctcaaccctgtgtcctgggcctgggcctgctgtgactgacctacagtggactttctctctggaatggaaccttcttaggcctcctggtgcaacttaatttttttttttaatgctatcttcaaaacgttagagaaagttcttcaaaagtgcagcccagagctgctgggcccactggccgtcctgcatttctggtttccagaccccaatgcctcccattcggatggatctctgcgtttttatactgagtgtgcctaggttgccccttattttttattttccctgttgcgttgctatagatgaagggtgaggacaatcgtgtatatgtactagaacttttttattaaagaaacttttcccagaaaaaaa

SEQ ID NO: 18 - protein, 829 aa, Homo Sapiens
MGLPRGPLASLLLLQVCWLQCAASEPCRAVFREAEVTLEAGGAEQEPGQALGKVFMGCPGQEPALFSTDNDDFTVRNGETVQERRSLKERNPLKIFPSKRILRRHKRDWVVAPISVPENGKGPFPQRLNQLKSNKDRDTKIFYSITGPGADSPPEGVFAVEKETGWLLLNKPLDREEIAKYELFGHAVSENGASVEDPMNISIIVTDQNDHKPKFTQDTFRGSVLEGVLPGTSVMQVTATDEDDAIYTYNGVVAYSIHSQEPKDPHDLMFTIHRSTGTISVISSGLDREKVPEYTLTIQATDMDGDGSTTTAVAVVEILDANDNAPMFDPQKYEAHVPENAVGHEVQRLTVTDLDAPNSPAWRATYLIMGGDDGDHFTITTHPESNQGILTTRKGLDFEAKNQHTLYVEVTNEAPFVLKLPTSTATIVVHVEDVNEAPVFVPPSKVVEVQEGIPTGEPVCVYTAEDPDKENQKISYRILRDPAGWLAMDPDSGQVTAVGTLDREDEQFVRNNIYEVMVLAMDNGSPPTTGTGTLLLTLIDVNDHGPVPEPRQITICNQSPVRQVLNITDKDLSPHTSPFQAQLTDDSDIYWTAEVNEEGDTVVLSLKKFLKQDTYDVHLSLSDHGNKEQLTVIRATVCDCHGHVETCPGPWKGGFILPVLGAVLALLFLLLVLLLLVRKKRKIKEPLLLPEDDTRDNVFYYGEEGGGEEDQDYDITQLHRGLEARPEVVLRNDVAPTIIPTPMYRPRPANPDEIGNFIIENLKAANTDPTAPPYDTLLVFDYEGSGSDAASLSSLTSSASDQDQDYDYLNEWGSRFKKLADMYGGGEDD

SEQ ID NO: 19 - DNA, 2249 bp, Homo Sapiens
  CDS (41)...(1075)
ctcctctacaaagaggtggacagagaagacagcagagaccatgggacccccctcagcccctccctgcagattgcatgtcccctggaaggaggtcctgctcacagcctcacttctaaccttctggaacccacccaccactgccaagctcactattgaatccacgccattcaatgtcgcagaggggaaggaggttcttctactcgcccacaacctgccccagaatcgtattggttacagctggtacaaaggcgaaagagtggatggcaacagtctaattgtaggatatgtaataggaactcaacaagctaccccagggcccgcatacagtggtcgagagacaatataccccaatgcatccctgctgatccagaacgtcacccagaatgacacaggattctataccctacaagtcataaagtcagatcttgtgaatgaagaagcaaccggacagttccatgtatacccggagctgcccaagccctccatctccagcaacaactccaaccccgtggaggacaaggatgctgtggccttcacctgtgaacctgaggttcagaacacaacctacctgtggtgggtaaatggtcagagcctcccggtcagtcccaggctgcagctgtccaatggcaacatgaccctcactctactcagcgtcaaaaggaacgatgcaggatcctatgaatgtgaaatacagaacccagcgagtgccaaccgcagtgacccagtcaccctgaatgtcctctatggcccagatgtccccaccatttccccctcaaaggccaattaccgtccaggggaaaatctgaacctctcctgccacgcagcctctaacccacctgcacagtactcttggtttatcaatgggacgttccagcaatccacacaagagctctttatccccaacatcactgtgaataatagcggatcctatatgtgccaagcccataactcagccactggcctcaataggaccacagtcacgatgatcacagtctctggaagtgctcctgtcctctcagctgtggccaccgtcggcatcacgattggagtgctggccagggtggctctgatatagcagccctggtgtattttcgatatttcaggaagactggcagattggaccagaccctgaattcttctagctcctccaatcccattttatcccatggaaccactaaaaacaaggtctgctctgctcctgaagccctatatgctggagatggacaactcaatgaaaatttaaagggaaaaccctcaggcctgaggtgtgtgccactcagagacttcacctaactagagacagtcaaactgcaaaccatggtgagaaattgacgacttcacactatggacagcttttcccaagatgtcaaaacaagactcctcatcatgataaggctcttacccccttttaatttgtccttgcttatgcctgcctctttcgcttggcaggatgatgctgtcattagtatttcacaagaagtagcttcagagggtaacttaacagagtgtcagatctatcttgtcaatcccaacgttttacataaaataagagatcctttagtgcacccagtgactgacattagcagcatctttaacacagccgtgtgttcaaatgtacagtggtccttttcagagttggacttctagactcacctgttctcactccctgttttaattcaacccagccatgcaatgccaaataatagaattgctccctaccagctgaacagggaggagtctgtgcagtttctgacacttgttgttgaacatggctaaatacaatgggtatcgctgagactaagttgtagaaattaacaaatgtgctgcttggttaaaatggctacactcatctgactcattctttattctattttagttggtttgtatcttgcctaaggtgcgtagtccaactcttggtattaccctcctaatagtcatactagtagtcatactccctggtgtagtgtattctctaaaagctttaaatgtctgcatgcagccagccatcaaatagtgaatggtctctctttggctggaattacaaaactcagagaaatgtgtcatcaggagaacatcataacccatgaaggataaaagccccaaatggtggtaactgataatagcactaatgctttaagatttggtcacactctcacctaggtgagcgcattgagccagtggtgctaaatgctacatactccaactgaaatgttaaggaagaagatagatccaaaaaaaaaaaaaaaaaa

SEQ ID NO: 20 - protein, 344 aa, Homo Sapiens
MGPPSAPPCRLHVPWKEVLLTASLLTFWNPPTTAKLTIESTPFNVAEGKEVLLLAHNLPQNRIGYSWYKGERVDGNSLIVGYVIGTQQATPGPAYSGRETIYPNASLLIQNVTQNDTGFYTLQVIKSDLVNEEATGQFHVYPELPKPSISSNNSNPVEDKDAVAFTCEPEVQNTTYLWWVNGQSLPVSPRLQLSNGNMTLTLLSVKRNDAGSYECEIQNPASANRSDPVTLNVLYGPDVPTISPSKANYRPGENLNLSCHAASNPPAQYSWFINGTFQQSTQELFIPNITVNNSGSYMCQAHNSATGLNRTTVTMITVSGSAPVLSAVATVGITIGVLARVALI

SEQ ID NO: 21 - DNA, 3443 bp, Homo Sapiens
  CDS (221)...(856)
gagcaacctcagcttctagtatccagactccagcgccgccccgggcgcggaccccaaccccgacccagagcttctccagcggcggcgcagcgagcagggctccccgccttaacttcctccgcggggcccagccaccttcgggagtccgggttgcccacctgcaaactctccgccttctgcacctgccacccctgagccagcgcgggcgcccgagcgagtcatggccaacgcggggctgcagctgttgggcttcattctcgccttcctgggatggatcggcgccatcgtcagcactgccctgccccagtggaggatttactcctatgccggcgacaacatcgtgaccgcccaggccatgtacgaggggctgtggatgtcctgcgtgtcgcagagcaccgggcagatccagtgcaaagtctttgactccttgctgaatctgagcagcacattgcaagcaacccgtgccttgatggtggttggcatcctcctgggagtgatagcaatctttgtggccaccgttggcatgaagtgtatgaagtgcttggaagacgatgaggtgcagaagatgaggatggctgtcattgggggtgcgatatttcttcttgcaggtctggctattttagttgccacagcatggtatggcaatagaatcgttcaagaattctatgaccctatgaccccagtcaatgccaggtacgaatttggtcaggctctcttcactggctgggctgctgcttctctctgccttctgggaggtgccctactttgctgttcctgtccccgaaaaacaacctcttacccaacaccaaggccctatccaaaacctgcaccttccagcgggaaagactacgtgtgacacagaggcaaaaggagaaaatcatgttgaaacaaaccgaaaatggacattgagatactatcattaacattaggaccttagaattttgggtattgtaatctgaagtatggtattacaaaacaaacaaacaaacaaaaaacccatgtgttaaaatactcagtgctaaacatggcttaatcttattttatcttctttcctcaatataggagggaagattttaccatttgtattactgcttcccattgagtaatcatactcaaatgggggaaggggtgctccttaaatatatatagatatgtatatatacatgtttttctattaaaaatagacagtaaaatactattctcattatgttgatactagcatacttaaaatatctctaaaataggtaaatgtatttaattccatattgatgaagatgtttattggtatattttctttttcgtccttatatacatatgtaacagtcaaatatcatttactcttcttcattagctttgggtgcctttgccacaagacctagcctaatttaccaaggatgaattctttcaattcttcatgcgtgcccttttcatatacttattttattttttaccataatcttatagcacttgcatcgttattaagcccttatttgttttgtgtttcattggtctctatctcctgaatctaacacatttcatagcctacattttagtttctaaagccaagaagaatttattacaaatcagaactttggaggcaaatctttctgcatgaccaaagtgataaattcctgttgaccttcccacacaatccctgtactctgacccatagcactcttgtttgctttgaaaatatttgtccaattgagtagctgcatgctgttcccccaggtgttgtaacacaactttattgattgaatttttaagctacttattcatagttttatatccccctaaactacctttttgttccccattccttaattgtattgttttcccaagtgtaattatcatgcgttttatatcttcctaataaggtgtggtctgtttgtctgaacaaagtgctagactttctggagtgataatctggtgacaaatattctctctgtagctgtaagcaagtcacttaatctttctacctcttttttctatctgccaaattgagataatgatacttaaccagttagaagaggtagtgtgaatattaattagtttatattactctcattctttgaacatgaactatgcctatgtagtgtctttatttgctcagctggctgagacactgaagaagtcactgaacaaaacctacacacgtaccttcatgtgattcactgccttcctctctctaccagtctatttccactgaacaaaacctacacacataccttcatgtggttcagtgccttcctctctctaccagtctatttccactgaacaaaacctacgcacataccttcatgtggctcagtgccttcctctctctaccagtctatttccattctttcagctgtgtctgacatgtttgtgctctgttccattttaacaactgctcttacttttccagtctgtacagaatgctatttcacttgagcaagatgatgtatggaaagggtgttggcactggtgtctggagacctggatttgagtcttggtgctatcaatcaccgtctgtgtttgagcaaggcatttggctgctgtaagcttattgcttcatctgtaagcggtggtttgtaattcctgatcttcccacctcacagtgatgttgtggggatccagtgagatagaatacatgtaagtgtggttttgtaatttgaaaagtgctatactaagggaaagaattgaggaattaactgcatacgttttggtgttgcttttcaaatgtttgaaaataaaaaaatgttaagaaatgggtttcttgccttaaccagtctctcaagtgatgagacagtgaagtaaaattgagtgcactaaacgaataagattctgaggaagtcttatcttctgcagtgagtatggcccaatgctttctgtggctaaacagatgtaatgggaagaaataaaagcctacgtgttggtaaatccaacagcaagggagatttttgaatcataataactcataaggtgctatctgttcagtgatgccctcagagctcttgctgttagctggcagctgacgctgctaggatagttagtttggaaatggtacttcataataaactacacaaggaaagtcagccaccgtgtcttatgaggaattggacctaataaattttagtgtgccttccaaacctgagaatatatgcttttggaagttaaaatttaaatggcttttgccacatacatagatcttcatgatgtgtgagtgtaattccatgtggatatcagttaccaaacattacaaaaaaattttatggcccaaaatgaccaacgaaattgttacaatagaatttatccaattttgatctttttatattcttctaccacacctggaaacagaccaatagacattttggggttttataatgggaatttgtataaagcattactctttttcaataaattgttttttaatttaaaaaaaggaaaaaaaaaaaaaaaaa

SEQ ID NO: 22 - protein, 211 aa, Homo Sapiens
MANAGLQLLGFILAFLGWIGAIVSTALPQWRIYSYAGDNIVTAQAMYEGLWMSCVSQSTGQIQCKVFDSLLNLSSTLQATRALMVVGILLGVIAIFVATVGMKCMKCLEDDEVQKMRMAVIGGAIFLLAGLAILVATAWYGNRIVQEFYDPMTPVNARYEFGQALFTGWAAASLCLLGGALLCCSCPRKTTSYPTPRPYPKPAPSSGKDYV

SEQ ID NO: 23 - DNA, 2863 bp, Homo Sapiens
  CDS (231)...(923)
tctccctctccaggggcatctccccctccaaggctctgcaaagaactgccctgtcttctagatgccttcttgaggctgcttgtggccacccacagacacttgtaaggaggagagaagtcagcctggcagagagactctgaaatgagggattagaggtgttcaaggagcaagagcttcagcctggagacaagggagcagtccctgaagacgcttctactgagaggtctgccatggcctctcttggcctccaacttgtgggctacatcctaggccttctggggcttttgggcacactggttgccatgctgctccccagctggaaaacaagttcttatgtcggtgccagcattgtgacagcagttggcttctccaagggcctctggatggaatgtgccacacacagcacaggcatcacccagtgtgacatctatagcacccttctgggcctgcccgctgacatccaggctgcccaggccatgatggtgacatccagtgcaatctcctccctggcctgcattatctctgtggtgggcatgagatgcacagtcttctgccaggaatcccgagccaaagacagagtggcggtagcaggtggagtctttttcatccttggaggcctcctgggattcattcctgttgcctggaatcttcatgggatcctacgggacttctactcaccactggtgcctgacagcatgaaatttgagattggagaggctctttacttgggcattatttcttccctgttctccctgatagctggaatcatcctctgcttttcctgctcatcccagagaaatcgctccaactactacgatgcctaccaagcccaacctcttgccacaaggagctctccaaggcctggtcaacctcccaaagtcaagagtgagttcaattcctacagcctgacagggtatgtgtgaagaaccaggggccagagctggggggtggctgggtctgtgaaaaacagtggacagcaccccgagggccacaggtgagggacactaccactggatcgtgtcagaaggtgctgctgaggatagactgactttggccattggattgagcaaaggcagaaatgggggctagtgtaacagcatgcaggttgaattgccaaggatgctcgccatgccagcctttctgttttcctcaccttgctgctcccctgccctaagtccccaaccctcaacttgaaaccccattcccttaagccaggactcagaggatccctttgccctctggtttacctgggactccatccccaaacccactaatcacatcccactgactgaccctctgtgatcaaagaccctctctctggctgaggttggctcttagctcattgctggggatgggaaggagaagcagtggcttttgtgggcattgctctaacctacttctcaagcttccctccaaagaaactgattggccctggaacctccatcccactcctgttatgactccacagtgtccagactaatttgtgcatgaactgaaataaaaccatcctacggtatccagggaacagaaagcaggatgcaggatgggaggacaggaaggcagcctgggacatttaaaaaattaaaaatgaaaaaaaaacccagaacccatttctcagggcactttccagaattctctcatatttgtgggctgggatcaagcctgcagcttgaggaaagcacaaggaaaggaaagaagatctggtggaaagctcaggtggcagcggactctgactccactgaggaactgcctcagaagctgcgatcacaactttggctgaagcccctgcctcactctagggcacctgacctggcctcttgcctaaaccacaaggctaagggctatagacaatggtttccttaggaacagtaaaccagtttttctagggatggcccttggctgggggatgacagtgtgggagctgtggggtactgaggaagacaccattccttgacggtgtctaagaagccaggtggatgtgtgtggtggctccagtgggtgtttctactctgccagtgagaggcagccccctagaaactcttcaggcgtaatggaaaatcagctcaaatgagatcaggcccccccagggtccacccacagagcactacagagcctctgaaagaccatagcaccaagcgagccccttcagattcccccactgtccatcggaagatgctccagagtggctagagggcatctaagggctccagcatggcatatccatgcccacggtgctgtgtccatgatctgagtgatagctgcactgctgcctgggattgcagctgaggtgggagtggagaatggttcccaggaagacagttccacctctaaggtccgaaaatgttccctttaccctggagtgggagtgaggggtcatacaccaaaggtattttccctcaccagtctaggcatgactggcttctgaaaaattccagcacacctcctcgaacctcattgtcagcagagagggcccatctgttgtctgtaacatgcctttcacatgtccaccttcttgccatgttccagctgctctcccaacctggaaggccgtctccccttagccaagtcctcctcaggcttggagaacttcctcagcgtcacctccttcattgagccttctctgatcaccccatccctctcctacccctccctcccccaaccctcaatgtataaattgcttcttgatgcttagcattcacaatttttgattgatcgttatttgtgtgtgtgtgtccgatctcacaagtatattgtaaacccttcggtgggtgggggccatatcctagacctctctgtatcccccagactatctgtaacagtgccaggcacacagtaggtgatcaataaacacttgttgattgag

SEQ ID NO: 24 - protein, 230 aa, Homo Sapiens
MASLGLQLVGYILGLLGLLGTLVAMLLPSWKTSSYVGASIVTAVGFSKGLWMECATHSTGITQCDIYSTLLGLPADIQAAQAMMVTSSAISSLACIISVVGMRCTVFCQESRAKDRVAVAGGVFFILGGLLGFIPVAWNLHGILRDFYSPLVPDSMKFEIGEALYLGIISSLFSLIAGIILCFSCSSQRNRSNYYDAYQAQPLATRSSPRPGQPPKVKSEFNSYSLTGYV

SEQ ID NO: 25 - DNA, 11447 bp, Homo Sapiens
  CDS (1)...(9192)
atgcggagtaggcttcccccagcgcttgccgccctgggcgcggccctactcctgtcttccattgaggcagaagttgacccaccttcagacttgaattttaaaattatagatgaaaatactgttcatatgtcatgggcagaaccagttgatccaattgtgggttacagaataacggtggaccctacaacggatgggcctactaaagaatttaccctttcagctagtaccactgaaactttattgtcagaacttgtacctgaaacagagtatgtggtgacaataacttcatatgatgaagtagaagaaagtgtaccagttataggacaactaacaattcaaacaggtagttcgacaaagccagtggagaagaaacctggaaaaaccgagatacaaaaatgctctgtcagtgcctggactgatttggttttcctcgtggatggctcttggagtgtgggaagaaataatttcaagtacattttagacttcattgctgctcttgtgtctgcttttgacattggggaagagaagacaagagttggagttgttcaatacagctctgacaccaggactgaatttaacttaaatcagtactaccaaagggatgaacttcttgctgcaataaaaaaaattccatataaaggtggcaacacaatgacaggggatgccattgattatttagttaaaaatactttcacggaatctgctggggcaagagttggctttcctaaagtggcaattattattacggatggaaaatcccaggatgaagtggaaattccagcaagagagcttcgtaatgttggagttgaagttttctccttgggcattaaagctgcagatgcaaaagaactcaaacaaattgcctccacaccttcactgaaccatgttttcaatgtggccaactttgatgcaattgtggatattcagaatgagatcatctcccaggtgtgctcaggagttgatgagcagcttggtgaattggttagtggagaagaagttgttgagcctccttcaaatttgattgccatggaagtctcttcaaaatatgttaagctaaattggaatccatctcctagtccagtgactggctacaaagtcatcctcacaccaatgactgcaggaagccgacagcacgctctgagtgtggggcctcagacaaccacgctcagtgttcgcgacctctcagcagacacggagtaccagatcagtgtttccgccatgaagggaatgacatccagtgaacccatttcaataatggagaagactcagccaatgaaagttcaagtggaatgttcacgtggtgtggatataaaagccgatattgtgtttttggttgatggctcctatagcattgggattgcaaactttgttaaagttagagcctttttggaagttcttgtaaaaagttttgaaatttcaccaaatagggtccagattagtcttgtgcaatacagccgggatcctcatactgagttcactttgaaaaaattcaccaaagttgaagatataattgaagcaataaacaccttcccttacagaggaggatctacaaatactggcaaagcaatgacttatgtcagagagaaaatatttgtgcctagcaagggatcaagaagcaatgtgccaaaggtcatgattcttatcacggatgggaaatcatcagatgctttcagagatcctgcgataaaactgaggaattcagatgttgaaatctttgcagttggtgtgaaggatgccgttcgctcagaattggaagctattgcctctcctcctgcagagacccatgtgttcacagtggaagattttgatgcttttcagaggatatcttttgaactcacacagtctatctgccttagaattgagcaagaattggcagctataaagaagaaagcttacgtccctccaaaggatcttagtttttcagaagtgacttcttatggtttcaaaaccaactggtctccagctggagaaaatgttttttcatatcacatcacctacaaggaagcggctggggatgatgaggtcactgtggtggagccagcatcgagcaccagtgttgttctcagcagcctgaagccagagaccttgtatttggtcaatgtgactgcggagtatgaggatggcttcagcattcccttagctggagaggagaccaccgaagaagtaaaaggagcacctcgaaacctaaaggtgacagatgagactacagatagtttcaaaattacttggactcaagctccagggagagttttaagatgtcgaattatatatagaccagttgctggtggagagagcagagaagttaccaccccacccaatcagaggaggagaacactggagaacttgattccagacacgaaatatgaagtatctgtaattcctgaatacttctcaggacctggtactccattaactggaaatgcagccactgaagaagttagagggaatccaagagacttaagagtttctgaccctacgacgtctactatgaaattatcttggagtggggcaccaggaaaagtgaaacagtatctcgtcacatataccccagtggcagggggtgaaactcaagaggtcactgtgaggggagatacaaccaatacggtgctgcagggattgaaggaagggacacaatacgccttatctgtgacagcactgtatgcgtctggggctggcgacgccctctttggtgaaggaacaacacttgaagaacgtggttctcctcaagatttagttactaaagacatcactgacacatcaattggggcttattggacatctgctccaggaatggttcgcggttacagggtctcatggaaatcactttatgatgatgttgacactggagagaaaaatctgcctgaagatgcaattcatacgatgatagaaaatctgcagccagagaccaaatacagaatttcagtatttgccacttacagcagtggagaaggagaacctttgactggagatgccacaactgaattatctcaagattccaaaaccctgaaagtagatgaagaaacagaaaacacaatgagagttacatggaaaccagcaccagggaaagtcgtcaactaccgtgttgtctatcgccctcatgggagagggaagcaaatggttgctaaggtgccccccacagtcacttcgacagtgttaaagcgacttcagccacagaccacatatgacatcacagttcttcctatttacaagatgggagaaggaaagcttaggcaaggatcaggaacaacagcttctcggtttaagtctcctagaaacctcaaaacatctgacccaaccatgtcaagcttccgagtgacttgggagcctgcccctggggaagtgaagggttataaagtcacattccaccctacgggggatgacagaagactgggggagttagtggttggaccctatgacaacacagttgttttggaggaacttagggctggtaccacctataaagtaaatgtttttggaatgtttgatggaggagaaagctcaccacttgttggacaagaaatgacaaccctttccgacacaactgttatgccaattttatcttctgggatggagtgtctcaccagagctgaggcagacattgtgttgctggtggatggatcatggagcatcggccgggcaaattttagaaccgtgaggagtttcatttctcgtattgtggaagtctttgacattggccccaaaagagtacaaattgctcttgctcagtatagtggggatcccagaacagagtggcagttaaatgcacacagagacaagaagagcttgttgcaagctgtggcaaacttgccgtacaaaggaggcaatactctcacaggcatggctttgaatttcattcgccaacagaacttcaggacccaagctggcatgagacctcgagctcgaaaaattggtgtgctcattactgatggaaaatcacaagacgatgttgaagcaccttcaaagaaactcaaggatgagggagtggagctgtttgctattggtattaaaaatgctgatgaagtcgaattaaagatgattgcaactgatcctgatgatacccatgactacaatgtggcagattttgagtcactctccaggatagtggatgatctcaccattaatttgtgtaacagtgtcaaaggtccaggtgatttggaagcaccttctaacttagttatttctgagcgaacccatcgttcttttagagtgagctggacaccaccttctgacagtgtggatcgatataaggtggaatactatccagtttctggagggaaacgtcaagaattttatgtgagtcgaatggaaactagcacagtgctgaaagatctgaaacctgaaactgaatatgttgtcaatgtgtattctgtggtagaagatgaatatagtgagcctctgaaggggacagaaaaaaccttgccagtgcctgtagtcagcctgaatatttatgatgttggccctaccaccatgcatgtgcagtggcagcctgtgggaggagctactggctacatcttgtcatacaaacctgttaaggacacagagccaacaagacccaaagaggtgcgtttggggccaacagtgaatgacatgcagctgactgaccttgttcccaacacggagtatgcagtcacagtccaggctgtcctgcacgacctcactagtgaacctgtcactgttcgggaagtcaccttgcctttacccagacctcaggatctgaaactcagagatgtgactcacagcactatgaatgtcttttgggaacctgtgcctggaaaagtgcgtaaatatattgttcgatacaaaacaccagaagaggatgtcaaagaggtagaggtggacagatcagagaccagcacttccctcaaagacctcttctcacagaccttgtacacagtcagcgtttctgcagtacatgacgagggggagtctcctccagtgactgctcaagaaactacccgacccgtgccagccccaacaaacttaaagattactgaagtaacatcagagggtttcagagggacttgggatcatggagcttcagatgtgtctctctacagaataacttggggaccttttggaagctcagataagatggagaccatcttaaatggagatgaaaacactttggtgttcgaaaacctgaaccccaacaccatctatgaagtttccattactgccatctatgctgatgagtcagaaagtgatgacctgattggcagtgagcgcactctgcctatcttaacaacacaagctcccaaaagtgggccacgaaaccttcaagtgtacaatgcaacatctaacagcctgactgttaagtgggatcctgctagtggtcgtgtgcagaaatataggatcacttatcagccttccacaggggaaggcaatgagcaaacgaccacaataggaggacggcagaacagtgtggtcctgcagaaactgaagccagacactccttacactatcaccgtatcctctctgtatcctgatggtgaaggaggtcggatgacgggaagaggcaagaccaaacctctaaacactgtaaggaacctgagagtgtatgacccttctaccagcactctgaatgtccgctgggaccatgcagagggaaatcctcgtcagtacaagctcttctatgcaccagcagcaggtggtccagaggaactggtaccaatccccgggaataccaattatgccattcttaggaatctgcagccagatacctcatacactgtgactgtagttcccgtttatactgaaggtgatgggggacgcacatcagatactggaaggacattgatgagaggactggcaagaaatgtccaagtatacaatcctacacctaacaggctcggtgttcgctgggaccctgcaccaggacctgtgctgcaatatcgcgttgtgtattctcctgtggatggcacaagaccctcagaatctatagtagtgccaggaaacacgcgcatggtgcatctggagcggctgattccggacacactctattccgtgaaccttgtggctctgtactcggatggagagggaaatcccagccctgcccagggccgaacgctaccacgcagtggaccaaggaacctgagagtctttggtgaaacaaccaatagcctctcggtagcctgggatcatgctgatgggccagttcagcagtacaggatcatctattctcccactgttggtgatccaattgatgaatataccacagtcccaggcagaagaaacaatgtaatactgcagcccctgcaacctgacactccatataaaattactgttattgctgtttatgaagatggagatggtggccatctaacaggaaatggaagaactgtgggactccttcctcctcagaacatacacatctctgacgaatggtatacaagattcagggtgtcctgggatccttcaccttctccagttcttggatataaaatagtatataagccagtgggttccaatgagcccatggaagcctttgttggagaaatgacatcatataccttacacaatctcaatcccagcaccacctacgatgtgaatgtttatgctcaatatgattctggactcagtgtccccttgacagatcaaggcactacattatatttaaatgtaacagatctgaaaacttaccagattgggtgggatacattctgtgtcaaatggtcacctcaccgggcagccacctcctacaggctaaaactaagccctgcagatggaaccaggggacaagaaattacagtgcgtggatcagaaaccagtcactgcttcactggcctttcaccagacactgattatggtgtcactgtttttgtgcagacaccaaatctcgagggaccaggagtctctgttaaagaacataccactgtgaaaccaacagaagcccctacagagccacccacacctcctccccctcccaccattccaccagcccgggatgtatgcaaaggggccaaggcagatattgtgttcttgactgatgcctcctggagcattggggacgataattttaacaaagttgtaaaattcatcttcaatactgtgggaggctttgatgaaatcagtcctgctgggattcaggtttcatttgtgcaatacagcgatgaggtcaagtctgagttcaagctgaacacgtacaatgacaaggccctagcccttggggccctccagaatattaggtacagaggaggaaacacaagaacaggcaaggccctcacgtttatcaaggagaaagtcttgacttgggagagcggcatgaggaagaatgtccctaaggtgttggttgtggtcacggacggtcggtcccaggatgaggtcaagaaggcggctttggtcatccagcagtcagggttcagtgtctttgtagttggtgtggctgatgtcgactacaatgagcttgccaacattgccagcaaaccaagtgaacggcacgtgttcattgtggacgactttgaatcttttgagaagatcgaagacaatcttattacatttgtttgtgaaactgccacttcaagttgtcctctcatttatttggatggctacacctcaccaggttttaaaatgcttgaagcatacaacctgacagaaaagaattttgcttctgtacaaggagtatctttggagtcagggtctttccccagctactcagcatacaggattcagaagaatgcgtttgtgaatcagcctacagcagacctacacccaaatggactccctccttcatacacgattatattattattcagacttctcccagaaactcccagtgacccttttgcaatttggcaaatcacagacagagactacaaaccacaagttggagtgattgcagatccttctagcaagacgttatcattctttaacaaggatacaagaggcgaggtgcaaactgttacatttgacacagaagaagtaaagacattattttatggaagttttcacaaggttcatattgtagtgacctcaaaaagtgttaagatttacattgactgctatgaaattatagaaaaagacatcaaggaagctggaaatataacaactgatggttatgaaattcttggaaaactccttaaaggggaaaggaaatcagccgcattccaaatccagagttttgacattgtctgcagtccagtgtggaccagtagagacagatgctgtgatattccctctaggagagatgagggaaaatgccctgcttttccaaattcttgcacatgtacacaggacagcgttggacctccaggacctccaggccctgcaggaggacctggtgctaaaggtcccagaggtgaaagaggtatcagtggggcaattgggccccctggtcctcgtggagacataggtcctccaggcccccagggtcctccaggccctcagggacccaatggactctctattccgggagagcaaggtcgccaagggatgaaaggtgatgctggagagccaggacttccaggccgaacaggaaccccaggattacctggcccaccaggaccaatgggacctccaggagacagaggcttcactggaaaagacagtgcaatgggacccaggggcccaccagggcggccgggaagcccaggctccccaggagtcacaggaccaagtgggaagccaggaaaacctggagatcatggcagaccaggtccatctgggttgaaaggagaaaaaggtgataggggagacattgcttcccagaacatgatgcgagcagttgcaagacaagtctgtgaacaattgataagtggtcagatgaacagattcaatcagatgctgaatcagattccaaatgattaccagtccagtcgcaaccagccaggcccgccgggtccaccgggacctcctggtagcgcaggagccagaggagaacctgggcctggggggcggccaggcttcccgggcacaccagggatgcagggaccccctggggaacgaggtttgccaggagagaaaggtgaaaggggtactggatcttcaggacctcgggggctgcctggccccccaggtccacaaggagaatccagaacaggtccaccagggtccacaggttcaagaggtccccctggcccccctggccgtcctggaaactcaggtatccgaggacccccaggtcctcctggatactgtgattcttctcagtgtgccagcatcccatacaacgggcaaagctatccaggttccggctaacacattttctaagtcgccagtgctgcttacagtttgaatacatgaaaatcctgtttctgagatgtttgcgcacgtgcttattaggaaatgagtctgtatggaaatctcaccacagataatggttaacgaaccgggtcgacatcacaaaggagggtggagactctttttactaacttgaatgagacaaaagcagtggtgtcagtttataatcctgatgcatttcagtaataatgtagaaaaacattattttaaaaaagttccaacacacagccatgaggagcctcagttttgaaagaggtgcataataaaactactaaccagaggagtctatgccattttaagaaaaacaattaacctggttaaagagaaatgtcttatgtaaataataaactaattgtggcttgtaaatgatttgtatgtgatcctgtcgactaaaatcacttaacaattctacaataagcttctgcatcaaagcctgccgcttgctctatgccggaataacaccaaatggaatctcctcatctcttgcttgttagcgatgtgtctgattcagggcatctgtctttttgttacttttttgtccgtgtcctctcatttgggttttgtaactgcaattttcaaaccaaagtttaaaatcaccttttcttcctgttttgctgtagtcactggtgttcctcacccaccagctgtaactcagtttgtgtgaggtacagccacagaagatgtcatgtactgtatattacctggtgatagttgcttttcaccccccgagttcagtttctaggagcccatgaaacttcccctcacctcctcatctttccaagttgttctttgaattgaggagtttgaaggcataaacagttacttggggatttgcgaaaatcctacttagttactgcgtttacagttctttggcccagtctctgacccttcccaagtatttgtgccatgattgtgtttactgctggatttttgaaggtttttttttttaagaaagtgccatttcattatttgattatcaccaaattatctggaaataattgggacattgtaacttatctatttatagttatgagattaagactggagtgccatcaccgcgggtgatgatttagcttttgctgtgtgtgtgtgtgtgtgtgtgccttccaaatcatgccataattgtaatgttgaatcggacagagccttacgtgcccgagggcggggcctacctgcctgagcgcgagcccttcatcgtgccggtggagcccgagcggacagcggaatacgaggactacggcgcagacgagcctgcagaggagcctcctgagccccaccggcgctggcggcgcgccctgccccacggacccgggcagtgaaccagagatcacgcgccgcgccgcgaggcttgggggaggtgttgaaattctcatttacaggtcagatagagcagtgtacgtcttttctgaggtgtttcttccagcgttgctcatccaggagtaccctttctgattgtagagaaccttgtttctgcaggaagcctagctccaagcacgcagtctgtagacatttttgcctttgcccttgaaatgcttgcaaaatactttgttaacaaaagctgcaaagagagaacatgccgtgtgcctttagttagcacagcgggcagcctcagtgaaactcttaggttaagcagtttaagtcctggaacccagagctgctgtgtatttcgagcgggcagtttatcttttgctatacttattttcaattcaattacaccacgattcaaataattcccctcctaaaaccaaaaaggagggaaacgtcaactccattgcaattacttatcttcctcttctatctctgttatacgccggggcatagaatgctcgtatacatctctttaacaaccacaaaccttaagccatgtagatgaagttagtgcatcaacgggatacagttccatattgccttaaacctccttgttttagacacactaacatttataccaaattgcagattattctgcagagagggaattgcatgtttgtgttgtatatttagtatgaacttttttcagaatataatatttcttagttatcaaaagtagttggaaaacatttgcaagactatgaacatagaattgctgcttttatattttaactgcagattgtgaatttcactgccttatattatttatttctgaaacaaaagaggcatttttcaataaaactactgaaaatttgaaaaaaaaaaaaaaaaaaaaaaaaaaaaaa

SEQ ID NO: 26 - protein, 3063 aa, Homo Sapiens
MRSRLPPALAALGAALLLSSIEAEVDPPSDLNFKIIDENTVHMSWAEPVDPIVGYRITVDPTTDGPTKEFTLSASTTETLLSELVPETEYVVTITSYDEVEESVPVIGQLTIQTGSSTKPVEKKPGKTEIQKCSVSAWTDLVFLVDGSWSVGRNNFKYILDFIAALVSAFDIGEEKTRVGVVQYSSDTRTEFNLNQYYQRDELLAAIKKIPYKGGNTMTGDAIDYLVKNTFTESAGARVGFPKVAIIITDGKSQDEVEIPARELRNVGVEVFSLGIKAADAKELKQIASTPSLNHVFNVANFDAIVDIQNEIISQVCSGVDEQLGELVSGEEVVEPPSNLIAMEVSSKYVKLNWNPSPSPVTGYKVILTPMTAGSRQHALSVGPQTTTLSVRDLSADTEYQISVSAMKGMTSSEPISIMEKTQPMKVQVECSRGVDIKADIVFLVDGSYSIGIANFVKVRAFLEVLVKSFEISPNRVQISLVQYSRDPHTEFTLKKFTKVEDIIEAINTFPYRGGSTNTGKAMTYVREKIFVPSKGSRSNVPKVMILITDGKSSDAFRDPAIKLRNSDVEIFAVGVKDAVRSELEAIASPPAETHVFTVEDFDAFQRISFELTQSICLRIEQELAAIKKKAYVPPKDLSFSEVTSYGFKTNWSPAGENVFSYHITYKEAAGDDEVTVVEPASSTSVVLSSLKPETLYLVNVTAEYEDGFSIPLAGEETTEEVKGAPRNLKVTDETTDSFKITWTQAPGRVLRCRIIYRPVAGGESREVTTPPNQRRRTLENLIPDTKYEVSVIPEYFSGPGTPLTGNAATEEVRGNPRDLRVSDPTTSTMKLSWSGAPGKVKQYLVTYTPVAGGETQEVTVRGDTTNTVLQGLKEGTQYALSVTALYASGAGDALFGEGTTLEERGSPQDLVTKDITDTSIGAYWTSAPGMVRGYRVSWKSLYDDVDTGEKNLPEDAIHTMIENLQPETKYRISVFATYSSGEGEPLTGDATTELSQDSKTLKVDEETENTMRVTWKPAPGKVVNYRVVYRPHGRGKQMVAKVPPTVTSTVLKRLQPQTTYDITVLPIYKMGEGKLRQGSGTTASRFKSPRNLKTSDPTMSSFRVTWEPAPGEVKGYKVTFHPTGDDRRLGELVVGPYDNTVVLEELRAGTTYKVNVFGMFDGGESSPLVGQEMTTLSDTTVMPILSSGMECLTRAEADIVLLVDGSWSIGRANFRTVRSFISRIVEVFDIGPKRVQIALAQYSGDPRTEWQLNAHRDKKSLLQAVANLPYKGGNTLTGMALNFIRQQNFRTQAGMRPRARKIGVLITDGKSQDDVEAPSKKLKDEGVELFAIGIKNADEVELKMIATDPDDTHDYNVADFESLSRIVDDLTINLCNSVKGPGDLEAPSNLVISERTHRSFRVSWTPPSDSVDRYKVEYYPVSGGKRQEFYVSRMETSTVLKDLKPETEYVVNVYSVVEDEYSEPLKGTEKTLPVPVVSLNIYDVGPTTMHVQWQPVGGATGYILSYKPVKDTEPTRPKEVRLGPTVNDMQLTDLVPNTEYAVTVQAVLHDLTSEPVTVREVTLPLPRPQDLKLRDVTHSTMNVFWEPVPGKVRKYIVRYKTPEEDVKEVEVDRSETSTSLKDLFSQTLYTVSVSAVHDEGESPPVTAQETTRPVPAPTNLKITEVTSEGFRGTWDHGASDVSLYRITWGPFGSSDKMETILNGDENTLVFENLNPNTIYEVSITAIYADESESDDLIGSERTLPILTTQAPKSGPRNLQVYNATSNSLTVKWDPASGRVQKYRITYQPSTGEGNEQTTTIGGRQNSVVLQKLKPDTPYTITVSSLYPDGEGGRMTGRGKTKPLNTVRNLRVYDPSTSTLNVRWDHAEGNPRQYKLFYAPAAGGPEELVPIPGNTNYAILRNLQPDTSYTVTVVPVYTEGDGGRTSDTGRTLMRGLARNVQVYNPTPNRLGVRWDPAPGPVLQYRVVYSPVDGTRPSESIVVPGNTRMVHLERLIPDTLYSVNLVALYSDGEGNPSPAQGRTLPRSGPRNLRVFGETTNSLSVAWDHADGPVQQYRIIYSPTVGDPIDEYTTVPGRRNNVILQPLQPDTPYKITVIAVYEDGDGGHLTGNGRTVGLLPPQNIHISDEWYTRFRVSWDPSPSPVLGYKIVYKPVGSNEPMEAFVGEMTSYTLHNLNPSTTYDVNVYAQYDSGLSVPLTDQGTTLYLNVTDLKTYQIGWDTFCVKWSPHRAATSYRLKLSPADGTRGQEITVRGSETSHCFTGLSPDTDYGVTVFVQTPNLEGPGVSVKEHTTVKPTEAPTEPPTPPPPPTIPPARDVCKGAKADIVFLTDASWSIGDDNFNKVVKFIFNTVGGFDEISPAGIQVSFVQYSDEVKSEFKLNTYNDKALALGALQNIRYRGGNTRTGKALTFIKEKVLTWESGMRKNVPKVLVVVTDGRSQDEVKKAALVIQQSGFSVFVVGVADVDYNELANIASKPSERHVFIVDDFESFEKIEDNLITFVCETATSSCPLIYLDGYTSPGFKMLEAYNLTEKNFASVQGVSLESGSFPSYSAYRIQKNAFVNQPTADLHPNGLPPSYTIILLFRLLPETPSDPFAIWQITDRDYKPQVGVIADPSSKTLSFFNKDTRGEVQTVTFDTEEVKTLFYGSFHKVHIVVTSKSVKIYIDCYEIIEKDIKEAGNITTDGYEILGKLLKGERKSAAFQIQSFDIVCSPVWTSRDRCCDIPSRRDEGKCPAFPNSCTCTQDSVGPPGPPGPAGGPGAKGPRGERGISGAIGPPGPRGDIGPPGPQGPPGPQGPNGLSIPGEQGRQGMKGDAGEPGLPGRTGTPGLPGPPGPMGPPGDRGFTGKDSAMGPRGPPGRPGSPGSPGVTGPSGKPGKPGDHGRPGPSGLKGEKGDRGDIASQNMMRAVARQVCEQLISGQMNRFNQMLNQIPNDYQSSRNQPGPPGPPGPPGSAGARGEPGPGGRPGFPGTPGMQGPPGERGLPGEKGERGTGSSGPRGLPGPPGPQGESRTGPPGSTGSRGPPGPPGRPGNSGIRGPPGPPGYCDSSQCASIPYNGQSYPGSG

SEQ ID NO: 27 - DNA, 6728 bp, Homo Sapiens
  CDS (120)...(4514)
agcagacgggagtttctcctcggggtcggagcaggaggcacgcggagtgtgaggccacgcatgagcggacgctaaccccctccccagccacaaagagtctacatgtctagggtctagacatgttcagctttgtggacctccggctcctgctcctcttagcggccaccgccctcctgacgcacggccaagaggaaggccaagtcgagggccaagacgaagacatcccaccaatcacctgcgtacagaacggcctcaggtaccatgaccgagacgtgtggaaacccgagccctgccggatctgcgtctgcgacaacggcaaggtgttgtgcgatgacgtgatctgtgacgagaccaagaactgccccggcgccgaagtccccgagggcgagtgctgtcccgtctgccccgacggctcagagtcacccaccgaccaagaaaccaccggcgtcgagggacccaagggagacactggcccccgaggcccaaggggacccgcaggcccccctggccgagatggcatccctggacagcctggacttcccggaccccccggaccccccggacctcccggaccccctggcctcggaggaaactttgctccccagctgtcttatggctatgatgagaaatcaaccggaggaatttccgtgcctggccccatgggtccctctggtcctcgtggtctccctggcccccctggtgcacctggtccccaaggcttccaaggtccccctggtgagcctggcgagcctggagcttcaggtcccatgggtccccgaggtcccccaggtccccctggaaagaatggagatgatggggaagctggaaaacctggtcgtcctggtgagcgtgggcctcctgggcctcagggtgctcgaggattgcccggaacagctggcctccctggaatgaagggacacagaggtttcagtggtttggatggtgccaagggagatgctggtcctgctggtcctaagggtgagcctggcagccctggtgaaaatggagctcctggtcagatgggcccccgtggcctgcctggtgagagaggtcgccctggagcccctggccctgctggtgctcgtggaaatgatggtgctactggtgctgccgggccccctggtcccaccggccccgctggtcctcctggcttccctggtgctgttggtgctaagggtgaagctggtccccaagggccccgaggctctgaaggtccccagggtgtgcgtggtgagcctggcccccctggccctgctggtgctgctggccctgctggaaaccctggtgctgatggacagcctggtgctaaaggtgccaatggtgctcctggtattgctggtgctcctggcttccctggtgcccgaggcccctctggaccccagggccccggcggccctcctggtcccaagggtaacagcggtgaacctggtgctcctggcagcaaaggagacactggtgctaagggagagcctggccctgttggtgttcaaggaccccctggccctgctggagaggaaggaaagcgaggagctcgaggtgaacccggacccactggcctgcccggaccccctggcgagcgtggtggacctggtagccgtggtttccctggcgcagatggtgttgctggtcccaagggtcccgctggtgaacgtggttctcctggccccgctggccccaaaggatctcctggtgaagctggtcgtcccggtgaagctggtctgcctggtgccaagggtctgactggaagccctggcagccctggtcctgatggcaaaactggcccccctggtcccgccggtcaagatggtcgccccggacccccaggcccacctggtgcccgtggtcaggctggtgtgatgggattccctggacctaaaggtgctgctggagagcccggcaaggctggagagcgaggtgttcccggaccccctggcgctgtcggtcctgctggcaaagatggagaggctggagctcagggaccccctggccctgctggtcccgctggcgagagaggtgaacaaggccctgctggctcccccggattccagggtctccctggtcctgctggtcctccaggtgaagcaggcaaacctggtgaacagggtgttcctggagaccttggcgcccctggcccctctggagcaagaggcgagagaggtttccctggcgagcgtggtgtgcaaggtccccctggtcctgctggaccccgaggggccaacggtgctcccggcaacgatggtgctaagggtgatgctggtgcccctggagctcccggtagccagggcgcccctggccttcagggaatgcctggtgaacgtggtgcagctggtcttccagggcctaagggtgacagaggtgatgctggtcccaaaggtgctgatggctctcctggcaaagatggcgtccgtggtctgaccggccccattggtcctcctggccctgctggtgcccctggtgacaagggtgaaagtggtcccagcggccctgctggtcccactggagctcgtggtgcccccggagaccgtggtgagcctggtccccccggccctgctggctttgctggcccccctggtgctgacggccaacctggtgctaaaggcgaacctggtgatgctggtgccaaaggcgatgctggtccccctgggcctgccggacccgctggaccccctggccccattggtaatgttggtgctcctggagccaaaggtgctcgcggcagcgctggtccccctggtgctactggtttccctggtgctgctggccgagtcggtcctcctggcccctctggaaatgctggaccccctggccctcctggtcctgctggcaaagaaggcggcaaaggtccccgtggtgagactggccctgctggacgtcctggtgaagttggtccccctggtccccctggccctgctggcgagaaaggatcccctggtgctgatggtcctgctggtgctcctggtactcccgggcctcaaggtattgctggacagcgtggtgtggtcggcctgcctggtcagagaggagagagaggcttccctggtcttcctggcccctctggtgaacctggcaaacaaggtccctctggagcaagtggtgaacgtggtccccccggtcccatgggcccccctggattggctggaccccctggtgaatctggacgtgagggggctcctgctgccgaaggttcccctggacgagacggttctcctggcgccaagggtgaccgtggtgagaccggccccgctggaccccctggtgctcctggtgctcctggtgcccctggccccgttggccctgctggcaagagtggtgatcgtggtgagactggtcctgctggtcccgccggtcccgtcggccccgtcggcgcccgtggccccgccggaccccaaggcccccgtggtgacaagggtgagacaggcgaacagggcgacagaggcataaagggtcaccgtggcttctctggcctccagggtccccctggccctcctggctctcctggtgaacaaggtccctctggagcctctggtcctgctggtccccgaggtccccctggctctgctggtgctcctggcaaagatggactcaacggtctccctggccccattgggccccctggtcctcgcggtcgcactggtgatgctggtcctgttggtccccccggccctcctggacctcctggtccccctggtcctcccagcgctggtttcgacttcagcttcctgccccagccacctcaagagaaggctcacgatggtggccgctactaccgggctgatgatgccaatgtggttcgtgaccgtgacctcgaggtggacaccaccctcaagagcctgagccagcagatcgagaacatccggagcccagagggaagccgcaagaaccccgcccgcacctgccgtgacctcaagatgtgccactctgactggaagagtggagagtactggattgaccccaaccaaggctgcaacctggatgccatcaaagtcttctgcaacatggagactggtgagacctgcgtgtaccccactcagcccagtgtggcccagaagaactggtacatcagcaagaaccccaaggacaagaggcatgtctggttcggcgagagcatgaccgatggattccagttcgagtatggcggccagggctccgaccctgccgatgtggccatccagctgaccttcctgcgcctgatgtccaccgaggcctcccagaacatcacctaccactgcaagaacagcgtggcctacatggaccagcagactggcaacctcaagaaggccctgctcctcaagggctccaacgagatcgagatccgcgccgagggcaacagccgcttcacctacagcgtcactgtcgatggctgcacgagtcacaccggagcctggggcaagacagtgattgaatacaaaaccaccaagtcctcccgcctgcccatcatcgatgtggcccccttggacgttggtgccccagaccaggaattcggcttcgacgttggccctgtctgcttcctgtaaactccctccatcccaacctggctccctcccacccaaccaactttccccccaacccggaaacagacaagcaacccaaactgaacccccccaaaagccaaaaaatgggagacaatttcacatggactttggaaaatatttttttcctttgcattcatctctcaaacttagtttttatctttgaccaaccgaacatgaccaaaaaccaaaagtgcattcaaccttaccaaaaaaaaaaaaaaaaaaaaaagaataaataaataagtttttaaaaaaggaagcttggtccacttgcttgaagacccatgcgggggtaagtccctttctgcccgttgggttatgaaaccccaatgctgccctttctgctcctttctccacaccccccttggcctcccctccactccttcccaaatctgtctccccagaagacacaggaaacaatgtattgtctgcccagcaatcaaaggcaatgctcaaacacccaagtggcccccaccctcagcccgctcctgcccgcccagcacccccaggccctggggacctggggttctcagactgccaaagaagccttgccatctggcgctcccatggctcttgcaacatctccccttcgtttttgagggggtcatgccgggggagccaccagcccctcactgggttcggaggagagtcaggaagggccacgacaaagcagaaacatcggatttggggaacgcgtgtcatcccttgtgccgcaggctgggcgggagagactgttctgttctgttccttgtgtaactgtgttgctgaaagactacctcgttcttgtcttgatgtgtcaccggggcaactgcctgggggcggggatgggggcagggtggaagcggctccccatttttataccaaaggtgctacatctatgtgatgggtggggtggggagggaatcactggtgctatagaaattgagatgcccccccaggccagcaaatgttcctttttgttcaaagtctatttttattccttgatattttttctttctttttttttttttttgtggatggggacttgtgaatttttctaaaggtgctatttaacatgggaggagagcgtgtgcgctccagcccagcccgctgctcactttccaccctctctccacctgcctctggcttctcaggcctctgctctccgacctctctcctctgaaaccctcctccacagctgcagcccatcctcccggctccctcctagtctgtcctgcgtcctctgtccccgggtttcagagacaacttcccaaagcacaaagcagtttttccctaggggtgggaggaagcaaaagactctgtacctattttgtatgtgtataataatttgagatgtttttaattattttgattgctggaataaagcatgtggaaatgacccaaacataatccgcagtggcctcctaatttccttctttggagttgggggaggggtagacatggggaaggggccttggggtgatgggcttgccttccattcctgccctttccctccccactattctcttctagatccctccataaccccactcccctttctctcacccttcttataccgcaaacctttctacttcctctttcattttctattcttgcaatttccttgcaccttttccaaatcctcttctcccctgcaataccatacaggcaatccacgtgcacaacacacacacacactcttcacatctggggttgtccaaacctcatacccactccccttcaagcccatccactctccaccccctggatgccctgcacttggtggcggtgggatgctcatggatactgggagggtgaggggagtggaacccgtgaggaggacctgggggcctctccttgaactgacatgaagggtcatctggcctctgctcccttctcacccacgctgacctcctgccgaaggagcaacgcaacaggagaggggtctgctgagcctggcgagggtctgggagggaccaggaggaaggcgtgctccctgctcgctgtcctggccctgggggagtgagggagacagacacctgggagagctgtggggaaggcactcgcaccgtgctcttgggaaggaaggagacctggccctgctcaccacggactgggtgcctcgacctcctgaatccccagaacacaacccccctgggctggggtggtctggggaaccatcgtgcccccgcctcccgcctactcctttttaagctt

SEQ ID NO: 28 - protein, 1464 aa, Homo Sapiens
MFSFVDLRLLLLLAATALLTHGQEEGQVEGQDEDIPPITCVQNGLRYHDRDVWKPEPCRICVCDNGKVLCDDVICDETKNCPGAEVPEGECCPVCPDGSESPTDQETTGVEGPKGDTGPRGPRGPAGPPGRDGIPGQPGLPGPPGPPGPPGPPGLGGNFAPQLSYGYDEKSTGGISVPGPMGPSGPRGLPGPPGAPGPQGFQGPPGEPGEPGASGPMGPRGPPGPPGKNGDDGEAGKPGRPGERGPPGPQGARGLPGTAGLPGMKGHRGFSGLDGAKGDAGPAGPKGEPGSPGENGAPGQMGPRGLPGERGRPGAPGPAGARGNDGATGAAGPPGPTGPAGPPGFPGAVGAKGEAGPQGPRGSEGPQGVRGEPGPPGPAGAAGPAGNPGADGQPGAKGANGAPGIAGAPGFPGARGPSGPQGPGGPPGPKGNSGEPGAPGSKGDTGAKGEPGPVGVQGPPGPAGEEGKRGARGEPGPTGLPGPPGERGGPGSRGFPGADGVAGPKGPAGERGSPGPAGPKGSPGEAGRPGEAGLPGAKGLTGSPGSPGPDGKTGPPGPAGQDGRPGPPGPPGARGQAGVMGFPGPKGAAGEPGKAGERGVPGPPGAVGPAGKDGEAGAQGPPGPAGPAGERGEQGPAGSPGFQGLPGPAGPPGEAGKPGEQGVPGDLGAPGPSGARGERGFPGERGVQGPPGPAGPRGANGAPGNDGAKGDAGAPGAPGSQGAPGLQGMPGERGAAGLPGPKGDRGDAGPKGADGSPGKDGVRGLTGPIGPPGPAGAPGDKGESGPSGPAGPTGARGAPGDRGEPGPPGPAGFAGPPGADGQPGAKGEPGDAGAKGDAGPPGPAGPAGPPGPIGNVGAPGAKGARGSAGPPGATGFPGAAGRVGPPGPSGNAGPPGPPGPAGKEGGKGPRGETGPAGRPGEVGPPGPPGPAGEKGSPGADGPAGAPGTPGPQGIAGQRGVVGLPGQRGERGFPGLPGPSGEPGKQGPSGASGERGPPGPMGPPGLAGPPGESGREGAPAAEGSPGRDGSPGAKGDRGETGPAGPPGAPGAPGAPGPVGPAGKSGDRGETGPAGPAGPVGPVGARGPAGPQGPRGDKGETGEQGDRGIKGHRGFSGLQGPPGPPGSPGEQGPSGASGPAGPRGPPGSAGAPGKDGLNGLPGPIGPPGPRGRTGDAGPVGPPGPPGPPGPPGPPSAGFDFSFLPQPPQEKAHDGGRYYRADDANVVRDRDLEVDTTLKSLSQQIENIRSPEGSRKNPARTCRDLKMCHSDWKSGEYWIDPNQGCNLDAIKVFCNMETGETCVYPTQPSVAQKNWYISKNPKDKRHVWFGESMTDGFQFEYGGQGSDPADVAIQLTFLRLMSTEASQNITYHCKNSVAYMDQQTGNLKKALLLKGSNEIEIRAEGNSRFTYSVTVDGCTSHTGAWGKTVIEYKTTKSSRLPIIDVAPLDVGAPDQEFGFDVGPVCFL

SEQ ID NO: 29 - DNA, 5921 bp, Homo Sapiens
  CDS (120)...(4514)
agcagacgggagtttctcctcggggtcggagcaggaggcacgcggagtgtgaggccacgcatgagcggacgctaaccccctccccagccacaaagagtctacatgtctagggtctagacatgttcagctttgtggacctccggctcctgctcctcttagcggccaccgccctcctgacgcacggccaagaggaaggccaagtcgagggccaagacgaagacatcccaccaatcacctgcgtacagaacggcctcaggtaccatgaccgagacgtgtggaaacccgagccctgccggatctgcgtctgcgacaacggcaaggtgttgtgcgatgacgtgatctgtgacgagaccaagaactgccccggcgccgaagtccccgagggcgagtgctgtcccgtctgccccgacggctcagagtcacccaccgaccaagaaaccaccggcgtcgagggacccaagggagacactggcccccgaggcccaaggggacccgcaggcccccctggccgagatggcatccctggacagcctggacttcccggaccccccggaccccccggacctcccggaccccctggcctcggaggaaactttgctccccagctgtcttatggctatgatgagaaatcaaccggaggaatttccgtgcctggccccatgggtccctctggtcctcgtggtctccctggcccccctggtgcacctggtccccaaggcttccaaggtccccctggtgagcctggcgagcctggagcttcaggtcccatgggtccccgaggtcccccaggtccccctggaaagaatggagatgatggggaagctggaaaacctggtcgtcctggtgagcgtgggcctcctgggcctcagggtgctcgaggattgcccggaacagctggcctccctggaatgaagggacacagaggtttcagtggtttggatggtgccaagggagatgctggtcctgctggtcctaagggtgagcctggcagccctggtgaaaatggagctcctggtcagatgggcccccgtggcctgcctggtgagagaggtcgccctggagcccctggccctgctggtgctcgtggaaatgatggtgctactggtgctgccgggccccctggtcccaccggccccgctggtcctcctggcttccctggtgctgttggtgctaagggtgaagctggtccccaagggccccgaggctctgaaggtccccagggtgtgcgtggtgagcctggcccccctggccctgctggtgctgctggccctgctggaaaccctggtgctgatggacagcctggtgctaaaggtgccaatggtgctcctggtattgctggtgctcctggcttccctggtgcccgaggcccctctggaccccagggccccggcggccctcctggtcccaagggtaacagcggtgaacctggtgctcctggcagcaaaggagacactggtgctaagggagagcctggccctgttggtgttcaaggaccccctggccctgctggagaggaaggaaagcgaggagctcgaggtgaacccggacccactggcctgcccggaccccctggcgagcgtggtggacctggtagccgtggtttccctggcgcagatggtgttgctggtcccaagggtcccgctggtgaacgtggttctcctggccccgctggccccaaaggatctcctggtgaagctggtcgtcccggtgaagctggtctgcctggtgccaagggtctgactggaagccctggcagccctggtcctgatggcaaaactggcccccctggtcccgccggtcaagatggtcgccccggacccccaggcccacctggtgcccgtggtcaggctggtgtgatgggattccctggacctaaaggtgctgctggagagcccggcaaggctggagagcgaggtgttcccggaccccctggcgctgtcggtcctgctggcaaagatggagaggctggagctcagggaccccctggccctgctggtcccgctggcgagagaggtgaacaaggccctgctggctcccccggattccagggtctccctggtcctgctggtcctccaggtgaagcaggcaaacctggtgaacagggtgttcctggagaccttggcgcccctggcccctctggagcaagaggcgagagaggtttccctggcgagcgtggtgtgcaaggtccccctggtcctgctggaccccgaggggccaacggtgctcccggcaacgatggtgctaagggtgatgctggtgcccctggagctcccggtagccagggcgcccctggccttcagggaatgcctggtgaacgtggtgcagctggtcttccagggcctaagggtgacagaggtgatgctggtcccaaaggtgctgatggctctcctggcaaagatggcgtccgtggtctgaccggccccattggtcctcctggccctgctggtgcccctggtgacaagggtgaaagtggtcccagcggccctgctggtcccactggagctcgtggtgcccccggagaccgtggtgagcctggtccccccggccctgctggctttgctggcccccctggtgctgacggccaacctggtgctaaaggcgaacctggtgatgctggtgccaaaggcgatgctggtccccctgggcctgccggacccgctggaccccctggccccattggtaatgttggtgctcctggagccaaaggtgctcgcggcagcgctggtccccctggtgctactggtttccctggtgctgctggccgagtcggtcctcctggcccctctggaaatgctggaccccctggccctcctggtcctgctggcaaagaaggcggcaaaggtccccgtggtgagactggccctgctggacgtcctggtgaagttggtccccctggtccccctggccctgctggcgagaaaggatcccctggtgctgatggtcctgctggtgctcctggtactcccgggcctcaaggtattgctggacagcgtggtgtggtcggcctgcctggtcagagaggagagagaggcttccctggtcttcctggcccctctggtgaacctggcaaacaaggtccctctggagcaagtggtgaacgtggtccccccggtcccatgggcccccctggattggctggaccccctggtgaatctggacgtgagggggctcctgctgccgaaggttcccctggacgagacggttctcctggcgccaagggtgaccgtggtgagaccggccccgctggaccccctggtgctcctggtgctcctggtgcccctggccccgttggccctgctggcaagagtggtgatcgtggtgagactggtcctgctggtcccgccggtcccgtcggccccgtcggcgcccgtggccccgccggaccccaaggcccccgtggtgacaagggtgagacaggcgaacagggcgacagaggcataaagggtcaccgtggcttctctggcctccagggtccccctggccctcctggctctcctggtgaacaaggtccctctggagcctctggtcctgctggtccccgaggtccccctggctctgctggtgctcctggcaaagatggactcaacggtctccctggccccattgggccccctggtcctcgcggtcgcactggtgatgctggtcctgttggtccccccggccctcctggacctcctggtccccctggtcctcccagcgctggtttcgacttcagcttcctgccccagccacctcaagagaaggctcacgatggtggccgctactaccgggctgatgatgccaatgtggttcgtgaccgtgacctcgaggtggacaccaccctcaagagcctgagccagcagatcgagaacatccggagcccagagggaagccgcaagaaccccgcccgcacctgccgtgacctcaagatgtgccactctgactggaagagtggagagtactggattgaccccaaccaaggctgcaacctggatgccatcaaagtcttctgcaacatggagactggtgagacctgcgtgtaccccactcagcccagtgtggcccagaagaactggtacatcagcaagaaccccaaggacaagaggcatgtctggttcggcgagagcatgaccgatggattccagttcgagtatggcggccagggctccgaccctgccgatgtggccatccagctgaccttcctgcgcctgatgtccaccgaggcctcccagaacatcacctaccactgcaagaacagcgtggcctacatggaccagcagactggcaacctcaagaaggccctgctcctcaagggctccaacgagatcgagatccgcgccgagggcaacagccgcttcacctacagcgtcactgtcgatggctgcacgagtcacaccggagcctggggcaagacagtgattgaatacaaaaccaccaagtcctcccgcctgcccatcatcgatgtggcccccttggacgttggtgccccagaccaggaattcggcttcgacgttggccctgtctgcttcctgtaaactccctccatcccaacctggctccctcccacccaaccaactttccccccaacccggaaacagacaagcaacccaaactgaacccccccaaaagccaaaaaatgggagacaatttcacatggactttggaaaatatttttttcctttgcattcatctctcaaacttagtttttatctttgaccaaccgaacatgaccaaaaaccaaaagtgcattcaaccttaccaaaaaaaaaaaaaaaaaaaaaagaataaataaataagtttttaaaaaaggaagcttggtccacttgcttgaagacccatgcgggggtaagtccctttctgcccgttgggttatgaaaccccaatgctgccctttctgctcctttctccacaccccccttggcctcccctccactccttcccaaatctgtctccccagaagacacaggaaacaatgtattgtctgcccagcaatcaaaggcaatgctcaaacacccaagtggcccccaccctcagcccgctcctgcccgcccagcacccccaggccctggggacctggggttctcagactgccaaagaagccttgccatctggcgctcccatggctcttgcaacatctccccttcgtttttgagggggtcatgccgggggagccaccagcccctcactgggttcggaggagagtcaggaagggccacgacaaagcagaaacatcggatttggggaacgcgtgtcatcccttgtgccgcaggctgggcgggagagactgttctgttctgttccttgtgtaactgtgttgctgaaagactacctcgttcttgtcttgatgtgtcaccggggcaactgcctgggggcggggatgggggcagggtggaagcggctccccatttttataccaaaggtgctacatctatgtgatgggtggggtggggagggaatcactggtgctatagaaattgagatgcccccccaggccagcaaatgttcctttttgttcaaagtctatttttattccttgatattttttctttctttttttttttttttgtggatggggacttgtgaatttttctaaaggtgctatttaacatgggaggagagcgtgtgcgctccagcccagcccgctgctcactttccaccctctctccacctgcctctggcttctcaggcctctgctctccgacctctctcctctgaaaccctcctccacagctgcagcccatcctcccggctccctcctagtctgtcctgcgtcctctgtccccgggtttcagagacaacttcccaaagcacaaagcagtttttccctaggggtgggaggaagcaaaagactctgtacctattttgtatgtgtataataatttgagatgtttttaattattttgattgctggaataaagcatgtggaaatgacccaaacataa

SEQ ID NO: 30 - DNA, 5086 bp, Homo Sapiens
  CDS (140)...(4240)
  misc_feature (1)...(5086): n = A,T,C or G
agcaccacggcagcaggaggtttcggnctaagttggaggtactggnccacgactgcatgcccgcgcccgccaggtgatacctccgccggtgacccaggggctctgcgacacaaggagtctgcatgtctaagtgctagacatgctcagctttgtggatacgcggactttgttgctgcttgcagtaaccttatgcctagcaacatgccaatctttacaagaggaaactgtaagaaagggcccagccggagatagaggaccacgtggagaaaggggtccaccaggccccccaggcagagatggtgaagatggtcccacaggccctcctggtccacctggtcctcctggcccccctggtctcggtgggaactttgctgctcagtatgatggaaaaggagttggacttggccctggaccaatgggcttaatgggacctagaggcccacctggtgcagctggagccccaggccctcaaggtttccaaggacctgctggtgagcctggtgaacctggtcaaactggtcctgcaggtgctcgtggtccagctggccctcctggcaaggctggtgaagatggtcaccctggaaaacccggacgacctggtgagagaggagttgttggaccacagggtgctcgtggtttccctggaactcctggacttcctggcttcaaaggcattaggggacacaatggtctggatggattgaagggacagcccggtgctcctggtgtgaagggtgaacctggtgcccctggtgaaaatggaactccaggtcaaacaggagcccgtgggcttcctggtgagagaggacgtgttggtgcccctggcccagctggtgcccgtggcagtgatggaagtgtgggtcccgtgggtcctgctggtcccattgggtctgctggccctccaggcttcccaggtgcccctggccccaagggtgaaattggagctgttggtaacgctggtcctgctggtcccgccggtccccgtggtgaagtgggtcttccaggcctctccggccccgttggacctcctggtaatcctggagcaaacggccttactggtgccaagggtgctgctggccttcccggcgttgctggggctcccggcctccctggaccccgcggtattcctggccctgttggtgctgccggtgctactggtgccagaggacttgttggtgagcctggtccagctggctccaaaggagagagcggtaacaagggtgagcccggctctgctgggccccaaggtcctcctggtcccagtggtgaagaaggaaagagaggccctaatggggaagctggatctgccggccctccaggacctcctgggctgagaggtagtcctggttctcgtggtcttcctggagctgatggcagagctggcgtcatgggccctcctggtagtcgtggtgcaagtggccctgctggagtccgaggacctaatggagatgctggtcgccctggggagcctggtctcatgggacccagaggtcttcctggttcccctggaaatatcggccccgctggaaaagaaggtcctgtcggcctccctggcatcgacggcaggcctggcccaattggcccagctggagcaagaggagagcctggcaacattggattccctggacccaaaggccccactggtgatcctggcaaaaacggtgataaaggtcatgctggtcttgctggtgctcggggtgctccaggtcctgatggaaacaatggtgctcagggacctcctggaccacagggtgttcaaggtggaaaaggtgaacagggtcccgctggtcctccaggcttccagggtctgcctggcccctcaggtcccgctggtgaagttggcaaaccaggagaaaggggtctccatggtgagtttggtctccctggtcctgctggtccaagaggggaacgcggtcccccaggtgagagtggtgctgccggtcctactggtcctattggaagccgaggtccttctggacccccagggcctgatggaaacaagggtgaacctggtgtggttggtgctgtgggcactgctggtccatctggtcctagtggactcccaggagagaggggtgctgctggcatacctggaggcaagggagaaaagggtgaacctggtctcagaggtgaaattggtaaccctggcagagatggtgctcgtggtgctcatggtgctgtaggtgcccctggtcctgctggagccacaggtgaccggggcgaagctggggctgctggtcctgctggtcctgctggtcctcggggaagccctggtgaacgtggcgaggtcggtcctgctggccccaacggatttgctggtccggctggtgctgctggtcaaccgggtgctaaaggagaaagaggagccaaagggcctaagggtgaaaacggtgttgttggtcccacaggccccgttggagctgctggcccagctggtccaaatggtccccccggtcctgctggaagtcgtggtgatggaggcccccctggtatgactggtttccctggtgctgctggacggactggtcccccaggaccctctggtatttctggccctcctggtccccctggtcctgctgggaaagaagggcttcgtggtcctcgtggtgaccaaggtccagttggccgaactggagaagtaggtgcagttggtccccctggcttcgctggtgagaagggtccctctggagaggctggtactgctggacctcctggcactccaggtcctcagggtcttcttggtgctcctggtattctgggtctccctggctcgagaggtgaacgtggtctacctggtgttgctggtgctgtgggtgaacctggtcctcttggcattgccggccctcctggggcccgtggtcctcctggtgctgtgggtagtcctggagtcaacggtgctcctggtgaagctggtcgtgatggcaaccctgggaacgatggtcccccaggtcgcgatggtcaacccggacacaagggagagcgcggttaccctggcaatattggtcccgttggtgctgcaggtgcacctggtcctcatggccccgtgggtcctgctggcaaacatggaaaccgtggtgaaactggtccttctggtcctgttggtcctgctggtgctgttggcccaagaggtcctagtggcccacaaggcattcgtggcgataagggagagcccggtgaaaaggggcccagaggtcttcctggcttaaagggacacaatggattgcaaggtctgcctggtatcgctggtcaccatggtgatcaaggtgctcctggctccgtgggtcctgctggtcctaggggccctgctggtccttctggccctgctggaaaagatggtcgcactggacatcctggtacggttggacctgctggcattcgaggccctcagggtcaccaaggccctgctggcccccctggtccccctggccctcctggacctccaggtgtaagcggtggtggttatgactttggttacgatggagacttctacagggctgaccagcctcgctcagcaccttctctcagacccaaggactatgaagttgatgctactctgaagtctctcaacaaccagattgagacccttcttactcctgaaggctctagaaagaacccagctcgcacatgccgtgacttgagactcagccacccagagtggagcagtggttactactggattgaccctaaccaaggatgcactatggatgctatcaaagtatactgtgatttctctactggcgaaacctgtatccgggcccaacctgaaaacatcccagccaagaactggtataggagctccaaggacaagaaacacgtctggctaggagaaactatcaatgctggcagccagtttgaatataatgtagaaggagtgacttccaaggaaatggctacccaacttgccttcatgcgcctgctggccaactatgcctctcagaacatcacctaccactgcaagaacagcattgcatacatggatgaggagactggcaacctgaaaaaggctgtcattctacagggctctaatgatgttgaacttgttgctgagggcaacagcaggttcacttacactgttcttgtagatggctgctctaaaaagacaaatgaatggggaaagacaatcattgaatacaaaacaaataagccatcacgcctgcccttccttgatattgcacctttggacatcggtggtgctgaccatgaattctttgtggacattggcccagtctgtttcaaataaatgaactcaatctaaattaaaaaagaaagaaatttgaaaaaactttctctttgccatttcttcttcttcttttttaactgaaagctgaatccttccatttcttctgcacatctacttgcttaaattgtgggcaaaagagaaaaagaaggattgatcagagcattgtgcaatacagtttcattaactccttcccccgctcccccaaaaatttgaatttttttttcaacactcttacacctgttatggaaaatgtcaacctttgtaagaaaaccaaaataaaaattgaaaaataaaaaccataaacatttgcaccacttgtggcttttgaatatcttccacagagggaagtttaaaacccaaacttccaaaggtttaaactacctcaaaacactttcccatgagtgtgatccacattgttaggtgctgacctagacagagatgaactgaggtccttgttttgttttgttcataatacaaaggtgctaattaatagtatttcagatacttgaagaatgttgatggtgctagaagaatttgagaagaaatactcctgtattgagttgtatcgtgtggtgtattttttaaaaaatttgatttagcattcatattttccatcttattcccaattaaaagtatgcagattatttgcccaaagttgtcctcttcttcagattcagcatttgttctttgccagtctcattttcatcttcttccatggttccacagaagctttgtttcttgggcaagcagaaaaattaaattgtacctattttgtatatgtgagatgtttaaataaattgtgaaaaaaatgaaataaagcatgtttggttttccaaaagaacatat

SEQ ID NO: 31 - protein, 1366 aa, Homo Sapiens
MLSFVDTRTLLLLAVTLCLATCQSLQEETVRKGPAGDRGPRGERGPPGPPGRDGEDGPTGPPGPPGPPGPPGLGGNFAAQYDGKGVGLGPGPMGLMGPRGPPGAAGAPGPQGFQGPAGEPGEPGQTGPAGARGPAGPPGKAGEDGHPGKPGRPGERGVVGPQGARGFPGTPGLPGFKGIRGHNGLDGLKGQPGAPGVKGEPGAPGENGTPGQTGARGLPGERGRVGAPGPAGARGSDGSVGPVGPAGPIGSAGPPGFPGAPGPKGEIGAVGNAGPAGPAGPRGEVGLPGLSGPVGPPGNPGANGLTGAKGAAGLPGVAGAPGLPGPRGIPGPVGAAGATGARGLVGEPGPAGSKGESGNKGEPGSAGPQGPPGPSGEEGKRGPNGEAGSAGPPGPPGLRGSPGSRGLPGADGRAGVMGPPGSRGASGPAGVRGPNGDAGRPGEPGLMGPRGLPGSPGNIGPAGKEGPVGLPGIDGRPGPIGPAGARGEPGNIGFPGPKGPTGDPGKNGDKGHAGLAGARGAPGPDGNNGAQGPPGPQGVQGGKGEQGPAGPPGFQGLPGPSGPAGEVGKPGERGLHGEFGLPGPAGPRGERGPPGESGAAGPTGPIGSRGPSGPPGPDGNKGEPGVVGAVGTAGPSGPSGLPGERGAAGIPGGKGEKGEPGLRGEIGNPGRDGARGAHGAVGAPGPAGATGDRGEAGAAGPAGPAGPRGSPGERGEVGPAGPNGFAGPAGAAGQPGAKGERGAKGPKGENGVVGPTGPVGAAGPAGPNGPPGPAGSRGDGGPPGMTGFPGAAGRTGPPGPSGISGPPGPPGPAGKEGLRGPRGDQGPVGRTGEVGAVGPPGFAGEKGPSGEAGTAGPPGTPGPQGLLGAPGILGLPGSRGERGLPGVAGAVGEPGPLGIAGPPGARGPPGAVGSPGVNGAPGEAGRDGNPGNDGPPGRDGQPGHKGERGYPGNIGPVGAAGAPGPHGPVGPAGKHGNRGETGPSGPVGPAGAVGPRGPSGPQGIRGDKGEPGEKGPRGLPGLKGHNGLQGLPGIAGHHGDQGAPGSVGPAGPRGPAGPSGPAGKDGRTGHPGTVGPAGIRGPQGHQGPAGPPGPPGPPGPPGVSGGGYDFGYDGDFYRADQPRSAPSLRPKDYEVDATLKSLNNQIETLLTPEGSRKNPARTCRDLRLSHPEWSSGYYWIDPNQGCTMDAIKVYCDFSTGETCIRAQPENIPAKNWYRSSKDKKHVWLGETINAGSQFEYNVEGVTSKEMATQLAFMRLLANYASQNITYHCKNSIAYMDEETGNLKKAVILQGSNDVELVAEGNSRFTYTVLVDGCSKKTNEWGKTIIEYKTNKPSRLPFLDIAPLDIGGADHEFFVDIGPVCFK

SEQ ID NO: 32 - DNA, 5460 bp, Homo Sapiens
  CDS (103)...(4503)
cgggcccggtgctgaagggcagggaacaacttgatggtgctactttgaactgcttttcttttctcctttttgcacaaagagtctcatgtctgatatttagacatgatgagctttgtgcaaaaggggagctggctacttctcgctctgcttcatcccactattattttggcacaacaggaagctgttgaaggaggatgttcccatcttggtcagtcctatgcggatagagatgtctggaagccagaaccatgccaaatatgtgtctgtgactcaggatccgttctctgcgatgacataatatgtgacgatcaagaattagactgccccaacccagaaattccatttggagaatgttgtgcagtttgcccacagcctccaactgctcctactcgccctcctaatggtcaaggacctcaaggccccaagggagatccaggccctcctggtattcctgggagaaatggtgaccctggtattccaggacaaccagggtcccctggttctcctggcccccctggaatctgtgaatcatgccctactggtcctcagaactattctccccagtatgattcatatgatgtcaagtctggagtagcagtaggaggactcgcaggctatcctggaccagctggccccccaggccctcccggtccccctggtacatctggtcatcctggttcccctggatctccaggataccaaggaccccctggtgaacctgggcaagctggtccttcaggccctccaggacctcctggtgctataggtccatctggtcctgctggaaaagatggagaatcaggtagacccggacgacctggagagcgaggattgcctggacctccaggtatcaaaggtccagctgggatacctggattccctggtatgaaaggacacagaggcttcgatggacgaaatggagaaaagggtgaaacaggtgctcctggattaaagggtgaaaatggtcttccaggcgaaaatggagctcctggacccatgggtccaagaggggctcctggtgagcgaggacggccaggacttcctggggctgcaggtgctcggggtaatgacggtgctcgaggcagtgatggtcaaccaggccctcctggtcctcctggaactgccggattccctggatcccctggtgctaagggtgaagttggacctgcagggtctcctggttcaaatggtgcccctggacaaagaggagaacctggacctcagggacacgctggtgctcaaggtcctcctggccctcctgggattaatggtagtcctggtggtaaaggcgaaatgggtcccgctggcattcctggagctcctggactgatgggagcccggggtcctccaggaccagccggtgctaatggtgctcctggactgcgaggtggtgcaggtgagcctggtaagaatggtgccaaaggagagcccggaccacgtggtgaacgcggtgaggctggtattccaggtgttccaggagctaaaggcgaagatggcaaggatggatcacctggagaacctggtgcaaatgggcttccaggagctgcaggagaaaggggtgcccctgggttccgaggacctgctggaccaaatggcatcccaggagaaaagggtcctgctggagagcgtggtgctccaggccctgcagggcccagaggagctgctggagaacctggcagagatggcgtccctggaggtccaggaatgaggggcatgcccggaagtccaggaggaccaggaagtgatgggaaaccagggcctcccggaagtcaaggagaaagtggtcgaccaggtcctcctgggccatctggtccccgaggtcagcctggtgtcatgggcttccccggtcctaaaggaaatgatggtgctcctggtaagaatggagaacgaggtggccctggaggacctggccctcagggtcctcctggaaagaatggtgaaactggacctcaaggacccccagggcctactgggcctggtggtgacaaaggagacacaggaccccctggtccacaaggattacaaggcttgcctggtacaggtggtcctccaggagaaaatggaaaacctggggaaccaggtccaaagggtgatgccggtgcacctggagctccaggaggcaagggtgatgctggtgcccctggtgaacgtggacctcctggattggcaggggccccaggacttagaggtggagctggtccccctggtcccgaaggaggaaagggtgctgctggtcctcctgggccacctggtgctgctggtactcctggtctgcaaggaatgcctggagaaagaggaggtcttggaagtcctggtccaaagggtgacaagggtgaaccaggcggcccaggtgctgatggtgtcccagggaaagatggcccaaggggtcctactggtcctattggtcctcctggcccagctggccagcctggagataagggtgaaggtggtgcccccggacttccaggtatagctggacctcgtggtagccctggtgagagaggtgaaactggccctccaggacctgctggtttccctggtgctcctggacagaatggtgaacctggtggtaaaggagaaagaggggctccgggtgagaaaggtgaaggaggccctcctggagttgcaggaccccctggaggttctggacctgctggtcctcctggtccccaaggtgtcaaaggtgaacgtggcagtcctggtggacctggtgctgctggcttccctggtgctcgtggtcttcctggtcctcctggtagtaatggtaacccaggacccccaggtcccagcggttctccaggcaaggatgggcccccaggtcctgcgggtaacactggtgctcctggcagccctggagtgtctggaccaaaaggtgatgctggccaaccaggagagaagggatcgcctggtgcccagggcccaccaggagctccaggcccacttgggattgctgggatcactggagcacggggtcttgcaggaccaccaggcatgccaggtcctaggggaagccctggccctcagggtgtcaagggtgaaagtgggaaaccaggagctaacggtctcagtggagaacgtggtccccctggaccccagggtcttcctggtctggctggtacagctggtgaacctggaagagatggaaaccctggatcagatggtcttccaggccgagatggatctcctggtggcaagggtgatcgtggtgaaaatggctctcctggtgcccctggcgctcctggtcatccaggcccacctggtcctgtcggtccagctggaaagagtggtgacagaggagaaagtggccctgctggccctgctggtgctcccggtcctgctggttcccgaggtgctcctggtcctcaaggcccacgtggtgacaaaggtgaaacaggtgaacgtggagctgctggcatcaaaggacatcgaggattccctggtaatccaggtgccccaggttctccaggccctgctggtcagcagggtgcaatcggcagtccaggacctgcaggccccagaggacctgttggacccagtggacctcctggcaaagatggaaccagtggacatccaggtcccattggaccaccagggcctcgaggtaacagaggtgaaagaggatctgagggctccccaggccacccagggcaaccaggccctcctggacctcctggtgcccctggtccttgctgtggtggtgttggagccgctgccattgctgggattggaggtgaaaaagctggcggttttgccccgtattatggagatgaaccaatggatttcaaaatcaacaccgatgagattatgacttcactcaagtctgttaatggacaaatagaaagcctcattagtcctgatggttctcgtaaaaaccccgctagaaactgcagagacctgaaattctgccatcctgaactcaagagtggagaatactgggttgaccctaaccaaggatgcaaattggatgctatcaaggtattctgtaatatggaaactggggaaacatgcataagtgccaatcctttgaatgttccacggaaacactggtggacagattctagtgctgagaagaaacacgtttggtttggagagtccatggatggtggttttcagtttagctacggcaatcctgaacttcctgaagatgtccttgatgtgcagctggcattccttcgacttctctccagccgagcttcccagaacatcacatatcactgcaaaaatagcattgcatacatggatcaggccagtggaaatgtaaagaaggccctgaagctgatggggtcaaatgaaggtgaattcaaggctgaaggaaatagcaaattcacctacacagttctggaggatggttgcacgaaacacactggggaatggagcaaaacagtctttgaatatcgaacacgcaaggctgtgagactacctattgtagatattgcaccctatgacattggtggtcctgatcaagaatttggtgtggacgttggccctgtttgctttttataaaccaaactctatctgaaatcccaacaaaaaaaatttaactccatatgtgttcctcttgttctaatcttgtcaaccagtgcaagtgaccgacaaaattccagttatttatttccaaaatgtttggaaacagtataatttgacaaagaaaaatgatacttctctttttttgctgttccaccaaatacaattcaaatgctttttgttttatttttttaccaattccaatttcaaaatgtctcaatggtgctataataaataaacttcaacactctttatgataacaacactgtgttatattctttgaatcctagcccatctgcagagcaatgactgtgctcaccagtaaaagataacctttctttctgaaatagtcaaatacgaaattagaaaagccctccctattttaactacctcaactggtcagaaacacagattgtattctatgagtcccagaagatgaaaaaaattttatacgttgataaaacttataaatttcattgattaatctcctggaagattggtttaaaaagaaaagtgtaatgcaagaatttaaagaaatatttttaaagccacaattattttaatattggatatcaactgcttgtaaaggtgctcctcttttttcttgtcattgctggtcaagattactaatatttgggaaggctttaaagacgcatgttatggtgctaatgtactttcacttttaaactctagatcagaattgttgacttgcattcagaacataaatgcacaaaatctgtacatgtctcccatcagaaagattcattggcatgccacagggattctcctccttcatcctgtaaaggtcaacaataaaaaccaaattatggggctgcttttgtcacactagcatagagaatgtgttgaaatttaactttgtaagcttgtatgtggttgttgatcttttttttccttacagacacccataataaaata

SEQ ID NO: 33 - protein, 1466 aa, Homo Sapiens
MMSFVQKGSWLLLALLHPTIILAQQEAVEGGCSHLGQSYADRDVWKPEPCQICVCDSGSVLCDDIICDDQELDCPNPEIPFGECCAVCPQPPTAPTRPPNGQGPQGPKGDPGPPGIPGRNGDPGIPGQPGSPGSPGPPGICESCPTGPQNYSPQYDSYDVKSGVAVGGLAGYPGPAGPPGPPGPPGTSGHPGSPGSPGYQGPPGEPGQAGPSGPPGPPGAIGPSGPAGKDGESGRPGRPGERGLPGPPGIKGPAGIPGFPGMKGHRGFDGRNGEKGETGAPGLKGENGLPGENGAPGPMGPRGAPGERGRPGLPGAAGARGNDGARGSDGQPGPPGPPGTAGFPGSPGAKGEVGPAGSPGSNGAPGQRGEPGPQGHAGAQGPPGPPGINGSPGGKGEMGPAGIPGAPGLMGARGPPGPAGANGAPGLRGGAGEPGKNGAKGEPGPRGERGEAGIPGVPGAKGEDGKDGSPGEPGANGLPGAAGERGAPGFRGPAGPNGIPGEKGPAGERGAPGPAGPRGAAGEPGRDGVPGGPGMRGMPGSPGGPGSDGKPGPPGSQGESGRPGPPGPSGPRGQPGVMGFPGPKGNDGAPGKNGERGGPGGPGPQGPPGKNGETGPQGPPGPTGPGGDKGDTGPPGPQGLQGLPGTGGPPGENGKPGEPGPKGDAGAPGAPGGKGDAGAPGERGPPGLAGAPGLRGGAGPPGPEGGKGAAGPPGPPGAAGTPGLQGMPGERGGLGSPGPKGDKGEPGGPGADGVPGKDGPRGPTGPIGPPGPAGQPGDKGEGGAPGLPGIAGPRGSPGERGETGPPGPAGFPGAPGQNGEPGGKGERGAPGEKGEGGPPGVAGPPGGSGPAGPPGPQGVKGERGSPGGPGAAGFPGARGLPGPPGSNGNPGPPGPSGSPGKDGPPGPAGNTGAPGSPGVSGPKGDAGQPGEKGSPGAQGPPGAPGPLGIAGITGARGLAGPPGMPGPRGSPGPQGVKGESGKPGANGLSGERGPPGPQGLPGLAGTAGEPGRDGNPGSDGLPGRDGSPGGKGDRGENGSPGAPGAPGHPGPPGPVGPAGKSGDRGESGPAGPAGAPGPAGSRGAPGPQGPRGDKGETGERGAAGIKGHRGFPGNPGAPGSPGPAGQQGAIGSPGPAGPRGPVGPSGPPGKDGTSGHPGPIGPPGPRGNRGERGSEGSPGHPGQPGPPGPPGAPGPCCGGVGAAAIAGIGGEKAGGFAPYYGDEPMDFKINTDEIMTSLKSVNGQIESLISPDGSRKNPARNCRDLKFCHPELKSGEYWVDPNQGCKLDAIKVFCNMETGETCISANPLNVPRKHWWTDSSAEKKHVWFGESMDGGFQFSYGNPELPEDVLDVQLAFLRLLSSRASQNITYHCKNSIAYMDQASGNVKKALKLMGSNEGEFKAEGNSKFTYTVLEDGCTKHTGEWSKTVFEYRTRKAVRLPIVDIAPYDIGGPDQEFGVDVGPVCFL

SEQ ID NO: 34 - DNA, 6217 bp, Homo Sapiens
  CDS (158)...(4648)
cgcagactgtgctggagctggtgctgaaaaagggggtttgcagaggctgccctggggctggtgctgaaagaagagcccacagctgacttcatggtgctacaataacctcagaatctacttttcactctcaggagaacccacagtctaatatttagacatgatggcaaactgggcggaagcaagacctctcctcattcttattgttttattagggcaatttgtctcaataaaagcccaggaagaagacgaggatgaaggatatggtgaagaaatagcctgcactcagaatggccagatgtacttaaacagggacatttggaaacctgccccttgtcagatctgtgtctgtgacaatggagccattctctgtgacaagatagaatgccaggatgtgctggactgtgccgaccctgtaacgccccctggggaatgctgtcctgtctgttcacaaacacctggaggtggcaatacaaattttggtagaggaagaaagggacaaaagggagaaccaggattagtgcctgttgtaacaggcatacgtggtcgtccaggaccggcaggacctccaggatcacagggaccaagaggagagcgagggccaaaaggaagacctggccctcgtggacctcagggaattgatggagaaccaggtgttcctggtcaacctggtgctccaggacctcctggacatccgtcccacccaggacccgatggcttgagcaggccgttttcagctcaaatggctgggttggatgaaaaatctggacttgggagtcaagtaggactaatgcctggctctgtgggtcctgttggcccaaggggaccacagggtttacaaggacagcaaggtggtgcaggacctacaggacctcctggtgaacctggtgatcctggaccaatgggtccgattggttcacgtggaccagagggccctcctggtaaacctggggaagatggtgaacctggcagaaatggaaatcctggtgaagtgggatttgcaggatctccgggagctcgtggatttcctggggctcctggtcttccaggtctgaagggtcaccgaggacacaaaggtcttgaaggccctaaaggtgaagttggagcacctggttccaagggtgaagctggccccactggtccaatgggtgccatgggtcctctgggtccgaggggaatgccaggagagagagggagacttgggccacagggtgctcctggacaacgaggtgcacatggtatgcctggaaaacctggaccaatgggtcctcttgggataccaggctcttctggttttccaggaaatcctggaatgaagggagaagcaggtcctacaggggcgcgaggccctgaaggtcctcaggggcagagaggtgaaactgggcccccaggtccagttggctctccaggtcttcctggtgcaataggaactgatggtactcctggtcccaaaggcccaacgggctctccgggtacctctggtcctcctggctcagcagggcctcctggatctccaggacctcagggtagcactggtcctcaggggaattcgggccttccgggtgatccaggtttcaaaggagaagctggcccaaaaggggaaccagggccacatggtattcagggtccgataggcccacccggtgaagaaggcaaaagaggtcccagaggtgacccaggaacacttggtcctccagggccagtgggagaaaggggtgctcctggcaatcgtggttttccaggctctgatggtttacctgggccaaagggtgctcaaggagaacggggtcctgtaggttcttcaggacccaaaggaagccagggggatccaggacgtccaggggaacctgggcttccaggtgctcggggtttgacaggaaatcctggtgttcaaggtcctgaaggaaaacttggacctttgggtgcgccaggggaagatggccgtccaggtcctccaggctccataggaatcaaagggcagcccgggaccatgggccttccaggccccaaaggtagcaatggtgaccctgggaaacctggagaagcaggaaatcctggagttcctgggcaaaggggagctcctggaaaagatggtaaagttggtccttatggtcctcctgggccgccgggtctacgtggtgaaagaggagaacaaggacctccagggcccacaggttttcaggggcatcctggtcctccaggtcctcctggagaaggtggaaaaccaggtgatcaaggtgttcctggaggtcccggagcagttggcccgttaggacctagaggagaacgaggaaatcctggggaaagaggagaacctgggataactggactccctggtgagaagggaatggctggaggacatggtcctgatggcccaaaaggcagtccaggtccatctgggacccctggagatacaggcccaccaggtcttcaaggtatgccgggagaaagaggaattgcaggaactcctggccccaagggtgacagaggtggcataggagaaaaaggtgctgaaggcacagctggaaatgatggtgcaggaggtcttccaggtcctttgggccctccaggtccggcaggcctactgggagaaaagggtgaacctggtcctcgaggtttagttggtcctcctggctcccggggcaatcctggttctcgaggtgaaaatgggccaactggagctgttggttttgccggaccccaggggtctgacggacagcctggagtaaaaggtgaacctggagagccaggacagaagggagatgctggttctcctggaccacaaggtttagcaggatcccctggccctcatggtcctaatggtgttcctggactaaaaggtggtcgaggaacccaaggtccgcctggtgctacaggatttcctggttctgcgggcagagttggacctccaggccctgctggagctccaggacctgcgggacccctaggggaacccgggaaggagggacctccaggtcctcgtggggaccctggctctcatgggcgtgtgggagtccgaggaccagctggcccccctggtggcccaggagacaaaggggacccaggagaagatgggcaacctggtccagatggcccccctggtccagctggaacgaccgggcagagaggaattgttggcatgcctgggcaacgtggagagagaggcatgcccggcctaccaggcccagcgggaacaccaggaaaagtaggaccaactggtgcaacaggagataaaggtccacctggacctgtggggcccccaggctccaatggtcctgtaggggaacctggaccagaaggtccagctggcaatgatggtaccccaggacgggatggtgctgttggagaacgtggtgatcgtggagaccctgggcctgcaggtctgccaggctctcagggtgcccctggaactcctggccctgtgggtgctccaggagatgcaggacaaagaggagatccgggttctcggggtcctataggacacctgggtcgagctggaaaacgtggattacctggaccccaaggacctcgtggtgacaaaggtgatcatggagaccgaggcgacagaggtcagaagggccacagaggctttactggtcttcagggtcttcctggccctcctggtccaaatggtgaacaaggaagtgctggaatccctggaccatttggcccaagaggtcctccaggcccagttggtccttcaggtaaagaaggaaaccctgggccacttgggccattgggacctccaggtgtacgaggcagtgtaggagaagcaggacctgagggccctcctggtgagcctggcccacctggccctccgggtccccctggccaccttacagctgctcttggggatatcatggggcactatgatgaaagcatgccagatccacttcctgagtttactgaagatcaggcggctcctgatgacaaaaacaaaacggacccaggggttcatgctaccctgaagtcactcagtagtcagattgaaaccatgcgcagccccgatggctcgaaaaagcacccagcccgcacgtgtgatgacctaaagctttgccattccgcaaagcagagtggtgaatactggattgatcctaaccaaggatctgttgaagatgccatcaaagtttactgcaacatggaaacaggagaaacatgtatttcagcaaacccatccagtgtaccacgtaaaacctggtgggccagtaaatctcctgacaataaacctgtttggtatggtcttgatatgaacagagggtctcagttcgcttatggagaccaccaatcacctaatacagccattactcagatgacttttttgcgccttttatcaaaagaagcctcccagaacatcacttacatctgtaaaaacagtgtaggatacatggacgatcaagctaagaacctcaaaaaagctgtggttctcaaaggggcaaatgacttagatatcaaagcagagggaaatattagattccggtatatcgttcttcaagacacttgctctaagcggaatggaaatgtgggcaagactgtctttgaatatagaacacagaatgtggcacgcttgcccatcatagatcttgctcctgtggatgttggcggcacagaccaggaattcggcgttgaaattgggccagtttgttttgtgtaaagtaagccaagacacatcgacaatgagcaccaccatcaatgaccaccgccattcacaagaactttgactgtttgaagttgatcctgagactcttgaagtaatggctgatcctgcatcagcattgtatatatggtcttaagtgcctggcctccttatccttcagaatatttattttacttacaatcctcaagttttaattgattttaaatatttttcaatacaacagtttaggtttaagatgaccaatgacaatgaccacctttgcagaaagtaaactgattgaataaataaatctccgttttcttcaatttatttcagtgtaatgaaaaagttgcttagtatttatgaggaaattcttcttcctggcaggtagcttaaagagtggggtatatagagccacaacacatgtttattttgcttggctgcagttgaaaaatagaaattagtgcccttttgtgacctctcattccaagattgtcaattaaaaatgagtttaaaatgtttaacttgtgatcgagacctacatgcatgtcttgatattgtgtaactataatagagactctttaaggagaatcttaaaaaaaaaaaacgtttctcactgtcttaaatagaatttttaaatagtatatattcagtggcattttggagaacaaagtgaatttacttcgacttcttaaatttttgtaaaagactataagtttagacatctttctcattcaaatttaaagatatctttctcctcttgatcaatctatcaatattgatagaagtcacactagtatataccatttaatacatttacactttcttatttaagaagatattgaatgcaaaataattgacatatagaactttacaaacatatgtccaaggactctaaattgagactcttccacatgtacaatctcatcatcctgaagcctataatgaagaaaaagatctagaaactgagttgtggagctgactctaatcaaatgtgatgattggaattagaccatttggcctttgaactttcataggaaaaatgacccaacatttcttagcatgagctacctcatctctagaagctgggatggacttactattcttgtttatattttagatactgaaaggtgctatgcttctgttattattccaagactggagataggcagggctaaaaaggtattattatttttcctttaatgatggtgctaaaattcttcctataaaattccttaaaaataaagatggtttaatcactaccattgtgaaaacataactgttagacttcccgtttctgaaagaaagagcatcgttccaatgcttgttcactgttcctctgtcatactgtatctggaatgctttgtaatacttgcatgcttcttagaccagaacatgtaggtccccttgtgtctcaatactttttttttcttaattgcatttgttggctctattttaatttttttcttttaaaataaacagctgggaccatcccaaaagacaagccatgcatacaactttggtcatgtatctctgcaaagcatcaaattaaatgcacgcttttgtcatgtcaaaaaaaaaaaaaaa

SEQ ID NO: 35 - protein, 1496 aa, Homo Sapiens
MMANWAEARPLLILIVLLGQFVSIKAQEEDEDEGYGEEIACTQNGQMYLNRDIWKPAPCQICVCDNGAILCDKIECQDVLDCADPVTPPGECCPVCSQTPGGGNTNFGRGRKGQKGEPGLVPVVTGIRGRPGPAGPPGSQGPRGERGPKGRPGPRGPQGIDGEPGVPGQPGAPGPPGHPSHPGPDGLSRPFSAQMAGLDEKSGLGSQVGLMPGSVGPVGPRGPQGLQGQQGGAGPTGPPGEPGDPGPMGPIGSRGPEGPPGKPGEDGEPGRNGNPGEVGFAGSPGARGFPGAPGLPGLKGHRGHKGLEGPKGEVGAPGSKGEAGPTGPMGAMGPLGPRGMPGERGRLGPQGAPGQRGAHGMPGKPGPMGPLGIPGSSGFPGNPGMKGEAGPTGARGPEGPQGQRGETGPPGPVGSPGLPGAIGTDGTPGPKGPTGSPGTSGPPGSAGPPGSPGPQGSTGPQGNSGLPGDPGFKGEAGPKGEPGPHGIQGPIGPPGEEGKRGPRGDPGTLGPPGPVGERGAPGNRGFPGSDGLPGPKGAQGERGPVGSSGPKGSQGDPGRPGEPGLPGARGLTGNPGVQGPEGKLGPLGAPGEDGRPGPPGSIGIKGQPGTMGLPGPKGSNGDPGKPGEAGNPGVPGQRGAPGKDGKVGPYGPPGPPGLRGERGEQGPPGPTGFQGHPGPPGPPGEGGKPGDQGVPGGPGAVGPLGPRGERGNPGERGEPGITGLPGEKGMAGGHGPDGPKGSPGPSGTPGDTGPPGLQGMPGERGIAGTPGPKGDRGGIGEKGAEGTAGNDGAGGLPGPLGPPGPAGLLGEKGEPGPRGLVGPPGSRGNPGSRGENGPTGAVGFAGPQGSDGQPGVKGEPGEPGQKGDAGSPGPQGLAGSPGPHGPNGVPGLKGGRGTQGPPGATGFPGSAGRVGPPGPAGAPGPAGPLGEPGKEGPPGPRGDPGSHGRVGVRGPAGPPGGPGDKGDPGEDGQPGPDGPPGPAGTTGQRGIVGMPGQRGERGMPGLPGPAGTPGKVGPTGATGDKGPPGPVGPPGSNGPVGEPGPEGPAGNDGTPGRDGAVGERGDRGDPGPAGLPGSQGAPGTPGPVGAPGDAGQRGDPGSRGPIGHLGRAGKRGLPGPQGPRGDKGDHGDRGDRGQKGHRGFTGLQGLPGPPGPNGEQGSAGIPGPFGPRGPPGPVGPSGKEGNPGPLGPLGPPGVRGSVGEAGPEGPPGEPGPPGPPGPPGHLTAALGDIMGHYDESMPDPLPEFTEDQAAPDDKNKTDPGVHATLKSLSSQIETMRSPDGSKKHPARTCDDLKLCHSAKQSGEYWIDPNQGSVEDAIKVYCNMETGETCISANPSSVPRKTWWASKSPDNKPVWYGLDMNRGSQFAYGDHQSPNTAITQMTFLRLLSKEASQNITYICKNSVGYMDDQAKNLKKAVVLKGANDLDIKAEGNIRFRYIVLQDTCSKRNGNVGKTVFEYRTQNVARLPIIDLAPVDVGGTDQEFGVEIGPVCFV

SEQ ID NO: 36 - DNA, 2235 bp, Homo Sapiens
  CDS (1)...(2235)
atggctgtgctgcctggccctctgcagctgctgggagtgctgcttaccatttccctgagttccatcaggctcattcaggctggtgcctactatgggatcaagccgctgccacctcaaattcctcctcagatgccaccacaaattccacaataccagcccctgggtcagcaagtacctcacatgcctttggccaaagatggcctcgccatgggcaaggagatgccccacttgcagtatggcaaagagtatccacacctaccccaatatatgaaggaaattcaaccggcgccaagaatgggcaaggaagccgttcccaagaaaggcaaagaaataccattagccagtttacgaggggaacaaggtccccgtggagagcctggcccaagaggaccacctgggccccctggtttaccaggtcatgggatacctggaattaaaggaaaaccagggccacagggatatccaggagttggaaagccaggtatgcctggaatgccagggaagccaggagccatgggcatgcctggggcaaaaggagaaattggacagaaaggggaaattgggcctatggggatcccaggaccacaaggacctccagggcctcatggacttcctggcattgggaagccaggtgggccagggttaccagggcaaccaggaccaaagggtgatcgaggacccaaaggactaccaggacctcaaggccttcggggtcctaaaggagacaagggcttcgggatgccaggtgcgccaggtgtaaaggggcctccagggatgcacggcctccccggccctgttggactgccaggagtgggcaaaccaggagtgacaggcttccctgggccccagggccccctgggaaagccaggggctccaggagaacccggtcgacaaggccctattggggtaccgggggttcaaggacctcctgggatacccggaattggaaagccaggccaggatgggatcccaggccagccaggatttccaggtggcaaaggggagcaaggactgccagggctaccaggggccccaggccttccagggattgggaaaccaggcttcccaggacccaaaggtgaccggggcatgggaggtgttcctggggctcttggaccaagaggggagaaaggaccaataggttccccaggaatagggggttctccaggagagccaggcctgcctggaatcccaggtcctatgggccctccaggtgctattggttttcctggacccaaaggagaaggtgggattgtagggccacaggggccaccaggtcccaagggtgagccagggcttcaaggcttcccaggaaagccaggtttccttggtgaagtagggcctcctggcatgaggggtttcccaggtcccataggccccaagggggaacatgggcaaaaaggtgtaccaggactccctggtgttccagggcttctcggacctaagggagaaccaggaatcccaggggatcagggtttacagggccccccaggtatcccagggattgggggccctagtggccccattggaccacctgggattccaggccccaaaggggagcctggcctcccagggccccctgggttccctggtatagggaaacccggagtggcaggacttcatggccccccagggaagcctggtgcccttggtcctcaaggccagcctggccttccaggacccccaggccctccaggacctccaggacccccagctgtgatgccccctacaccaccaccccagggagagtatctgccagatatggggctgggaattgatggcgtgaaacccccccatgctacgggggctaagaaaggcaagaatggagggccagcctatgagatgcctgcatttaccgccgagctaaccgcaccctttccaccggtggggggcccagtgaagtttaacaaactgctgtataacggcagacagaactacaacccgcagacaggcatcttcacctgtgaggtccctggtgtctactactttgcataccacgttcactgcaagggggggaacgtgtgggttgctctattcaagaacaacgagcccgtgatgtacacgtacgacgagtacaaaaagggcttcctggaccaggcatctgggagtgcagtgctgctgctcaggcccggagaccgggtgttcctccagatgccctcagaacaggctgcaggactgtatgccgggcagtatgtccactcctccttttcaggatatttattgtatcccatgtaa

SEQ ID NO: 37 - protein, 744 aa, Homo Sapiens
MAVLPGPLQLLGVLLTISLSSIRLIQAGAYYGIKPLPPQIPPQMPPQIPQYQPLGQQVPHMPLAKDGLAMGKEMPHLQYGKEYPHLPQYMKEIQPAPRMGKEAVPKKGKEIPLASLRGEQGPRGEPGPRGPPGPPGLPGHGIPGIKGKPGPQGYPGVGKPGMPGMPGKPGAMGMPGAKGEIGQKGEIGPMGIPGPQGPPGPHGLPGIGKPGGPGLPGQPGPKGDRGPKGLPGPQGLRGPKGDKGFGMPGAPGVKGPPGMHGLPGPVGLPGVGKPGVTGFPGPQGPLGKPGAPGEPGRQGPIGVPGVQGPPGIPGIGKPGQDGIPGQPGFPGGKGEQGLPGLPGAPGLPGIGKPGFPGPKGDRGMGGVPGALGPRGEKGPIGSPGIGGSPGEPGLPGIPGPMGPPGAIGFPGPKGEGGIVGPQGPPGPKGEPGLQGFPGKPGFLGEVGPPGMRGFPGPIGPKGEHGQKGVPGLPGVPGLLGPKGEPGIPGDQGLQGPPGIPGIGGPSGPIGPPGIPGPKGEPGLPGPPGFPGIGKPGVAGLHGPPGKPGALGPQGQPGLPGPPGPPGPPGPPAVMPPTPPPQGEYLPDMGLGIDGVKPPHATGAKKGKNGGPAYEMPAFTAELTAPFPPVGGPVKFNKLLYNGRQNYNPQTGIFTCEVPGVYYFAYHVHCKGGNVWVALFKNNEPVMYTYDEYKKGFLDQASGSAVLLLRPGDRVFLQMPSEQAAGLYAGQYVHSSFSGYLLYPM

SEQ ID NO: 38 - DNA, 5572 bp, Homo Sapiens
  CDS (238)...(2472)
ctccgtgggagccagcgagcctctctccctgatcttacgtgctcaagggagctcacacgttcaccaactcacccttgaagtcatctcaagaacaaaagacaactgaaagaagctgttgtgaaggcagagcagcatctgctgaagagacagaaaccagccccagaggtgtcacaggaaggcaccagcaaggacattggtctttgatttgattcagcagtcctgtcaagtataaatgtgatggctgtgctgcctggccctctgcagctgctgggagtgctgcttaccatttccctgagttccatcaggctcattcaggctggtgcctactatgggatcaagccgctgccacctcaaattcctcctcagatgccaccacaaattccacaataccagcccctgggtcagcaagtacctcacatgcctttggccaaagatggccttgccatgggcaaggagatgccccacttgcagtatggcaaagagtatccacacctaccccaatatatgaaggaaattcaaccggcgccaagaatgggcaaggaagccgtacccaagaaaggcaaagaaataccattagccagtttacgaggggaacaaggtccccgtggagagcctggcccaagaggaccacctgggccccctggtttgccaggtcatgggatacctggaattaaaggaaaaccagggccacagggatatccaggagttggaaagccaggtatgcctggaatgccagggaagccaggagccatgggcatgcctggggcaaaaggagaaattggacagaaaggggaaattgggcctatggggatcccaggaccacaaggacctccagggcctcatggacttcctggcattgggaagccaggtgggccagggttaccagggcaaccaggaccaaagggtgatcgaggacccaaaggactaccaggacctcaaggccttcggggtcctaaaggagacaagggcttcgggatgccaggtgcgccaggtgtaaaggggcctccagggatgcacggccctcccggccctgttggactgccaggagtgggcaaaccaggagtgacaggcttccctgggccccagggccccctgggaaagccaggggctccaggagaacctgggccacaaggccctattggggtaccgggggttcaaggacctcctgggatacccggaattggaaagccaggccaggatgggatcccaggccagccaggatttccaggtggcaaaggggagcaaggactgccagggctaccaggacccccaggccttccagggattgggaaaccaggcttcccaggacccaaaggtgaccggggcatgggaggtgttcctggggctcttggaccaagaggggagaaaggaccaataggtgccccaggaatagggggtcctccaggagagccaggcctgcctggaatcccaggtcctatgggccctccaggtgctattggttttcctggacccaaaggagaaggtgggattgtagggccacaggggccaccaggtcccaagggtgagccagggcttcaaggcttcccaggaaagccaggtttccttggtgaagtagggcctcctggcatgaggggtttgccaggtcccatagggcccaagggggaagctgggcaaaaaggtgtaccaggactccctggtgttccagggcttctcggacctaagggagagccaggaatcccaggggatcagggtttacagggccccccaggtatcccagggattgggggccctagtggccccattggaccacctgggattccaggccccaaaggggagccgggcctcccagggccccctgggttccctggtatagggaaacccggagtggcaggacttcatggccccccagggaagcctggtgcccttggtcctcaaggccagcctggccttccaggacccccaggccctccaggacctccaggacccccagctgtgatgccccctacaccaccaccccagggagagtatctgccagatatggggctgggaattgatggcgtgaaacccccccatgcctacggggctaagaaaggcaagaatggagggccagcctatgagatgcctgcatttaccgccgagctaaccgcacctttcccaccggtgggggccccagtgaagtttaacaaactgctgtataacggcagacagaactacaacccgcagacaggcatcttcacctgtgaggtccctggtgtctactactttgcataccacgttcactgcaaggggggcaacgtgtgggttgctctattcaagaacaacgagcccgtgatgtacacgtacgacgagtacaaaaagggcttcctggaccaggcatctgggagtgcagtgctgctgctcaggcccggagaccgggtgttcctccagatgccctcagaacaggctgcaggactgtatgccgggcagtatgtccactcctccttttcaggatatttattgtatcccatgtaaaaacaaaaaaacaaaaaacaaagaaaagaaagagattttatagaagaaaatgacacaccaaaaaatccaaatgaaaaacataattgcttcaaaacacttacacagttggaaagttatatgtaagtgaaaatttggaccattgtgtacaaataaaaactaagatgcatgtttaatactccacacagcagcctgtaattgcgaatgatgggatagagttatgtatcaagtactgacacttggttgtacccactggaatcatattagctgttttatgttatatgcttccacagtaacctgcttattcagatcagtcaaaatatatcagtatgaaagatcatagctaatgaaaggcactcactcatattgtttactttaaaatatttataaatatgccttaaagaaatacaaatgataacaattacataccgtatttacttgcttaatttcctctgtatttgtgtagatactttgacatggaatatatggtggggagacccgtagtgttaccgccccagtgggagggggccctggggaccctggtaatgctttagtcaaagggatatctctcttgtatcagaggctgtgtcttttagtaacaggagtcctcgtcagaattgcgtgtctgttgtctctaaaagaatgggtgaaccaatcggcctttgtgaatttattcagtgccttctctgtaccaagcactgggtaaggcacttttgtggagcattagacagtaaccctcaaggagctagagaaccggatgggagacatgagcggtaattaactcacttgttccccagagtttctatttgttttgattttctttttctgtgacttattttcctattttctttcctccatgtaattttcactatggcccaactaatataaacacctggaaattacaaggaaaaaaaattcttcctctaataactttccaaatttgtggaatatttatttgtaatagcagttatcagttatgcttatatagcattaaaaattctcctcctttgactacacacacaaccacagtgtggttctaatcatggagatatcagtaatttttagtaactgaattttgaggacatttctctgtttagcatgtatgcaaactgatatgtaatctgaggttccaaagtcamtttttttcttttttttttgagatggagtcttactctgtcacccaggctggagtgcagtagcacgatcttggcttactgcaacctctacctcctaggttcaagcaattgtcctgtctcagcctcccgagtactgggactactgtcttgcgccaccatgcctggctaatttttgtatatttagtaaagatgggttttcgccatgttggccaggctggtctcaaactcctggcctcaagtgatgcacctgcctcagccttccaaagtgctgggattacaggcatgagccaccgtgcccggccaaagtcagctttcaaaatccaagccataattggtgaggggggagtttcagaattacatagaaaaattaatatttgaaaaaataattctgaaatttcgaatttaaaaacagatgtgctgcttctgggtgtaggtagtaaaagtataggaaaagaactgtttccttagaagcggactgtggaagggctatgtagaatgtcaaagggcaacaagagcctgtgtttttaatgtcatcctgtactcggcacaaatcaaaggccaatacaagtctgaaaagcagaaataaatatttttccaggtttttgcttgggcacatactaactgctttgggcattctaatctggtctccaaacaccaaagacccatttcgagcctgctattagcctgctgctgactctatcacttggagcaataatgtggggttatggtggtggaatcttgtatatttttgtcaaaaataaaaccttgagttaaggggatagatatagatggaaaaatacacaaataaatacggtatgaaaacacatggaaatgtgtctttgtcaaatmtgaatcattattaccatcacaaaaattcttctcttggccaatatctcatttccctatatagtatacaagcaccatttcttctcaatttttaagaagagaaattagtccattaccacaggggttcttgtcactactaattatacaacaatcttttcccaacaaaaagatgtcctccacaacctttgttttcaaagcagacagcatctatgtggccaaatatactttgggttgttcttgaggatactggttttgggctgatgactatggtgggcagcatggatccattgggctccttctgctaaacagccacattgaaatggtttaaaagcaagtcagatcaggtgatttgtaaaattgtatttatctgtacatgtatgggcttttaattcccaccaagaaagagagaaattatctttttagttaaaaccaaatttcacttttcaaaatatcttccaacttatttattggttgtcactcaattgcctatatatatatatatatktttgtgtgtgtgtgtgtgcgcgtgagcgcacgtgtgtgtatgcgtgcgcatgtgtgtgtatgtgtattatcagacataggtttctaacttttagatagaagaggagcaacatctatgccaaatactgtgcattctacaatggtgctaatctcagacctaaaatgatactccatttaatttaaaaaagagttttaaataattatctatgtgcctgtatttcccttttgagtgctgcacaacatgttaacatattagtgtaaaagcagatgaaacaaccacgtgttctaaagtctagggattgtgctataatccctatttagttcaaaattaaccagaattcttccatgtgaaatggaccaaactcatattattgttatgtaaatacagagttttaatgcagtatgacatcccacaggggaaaagaatgtctgtagtgggtgactgttatcaaatattttatagaatacaatgaacggtgaacagactggtaacttgtttgagttcccatgacagatttgagacttgtcaatagcaaatcatttttgtatttaaatttttgtactgatttgaaaaacatcattaaatatctttaaaagtaaaaaaaaaaaaaaaaaaa

SEQ ID NO: 39 - protein, 744 aa, Homo Sapiens
MAVLPGPLQLLGVLLTISLSSIRLIQAGAYYGIKPLPPQIPPQMPPQIPQYQPLGQQVPHMPLAKDGLAMGKEMPHLQYGKEYPHLPQYMKEIQPAPRMGKEAVPKKGKEIPLASLRGEQGPRGEPGPRGPPGPPGLPGHGIPGIKGKPGPQGYPGVGKPGMPGMPGKPGAMGMPGAKGEIGQKGEIGPMGIPGPQGPPGPHGLPGIGKPGGPGLPGQPGPKGDRGPKGLPGPQGLRGPKGDKGFGMPGAPGVKGPPGMHGPPGPVGLPGVGKPGVTGFPGPQGPLGKPGAPGEPGPQGPIGVPGVQGPPGIPGIGKPGQDGIPGQPGFPGGKGEQGLPGLPGPPGLPGIGKPGFPGPKGDRGMGGVPGALGPRGEKGPIGAPGIGGPPGEPGLPGIPGPMGPPGAIGFPGPKGEGGIVGPQGPPGPKGEPGLQGFPGKPGFLGEVGPPGMRGLPGPIGPKGEAGQKGVPGLPGVPGLLGPKGEPGIPGDQGLQGPPGIPGIGGPSGPIGPPGIPGPKGEPGLPGPPGFPGIGKPGVAGLHGPPGKPGALGPQGQPGLPGPPGPPGPPGPPAVMPPTPPPQGEYLPDMGLGIDGVKPPHAYGAKKGKNGGPAYEMPAFTAELTAPFPPVGAPVKFNKLLYNGRQNYNPQTGIFTCEVPGVYYFAYHVHCKGGNVWVALFKNNEPVMYTYDEYKKGFLDQASGSAVLLLRPGDRVFLQMPSEQAAGLYAGQYVHSSFSGYLLYPM

SEQ ID NO: 40 - DNA, 2439 bp, Homo Sapiens
  CDS (26)...(2299)
cagcacccagctccccgccaccgccatggtccccgacaccgcctgcgttcttctgctcaccctggctgccctcggcgcgtccggacagggccagagcccgttgggctcagacctgggcccgcagatgcttcgggaactgcaggaaaccaacgcggcgctgcaggacgtgcgggactggctgcggcagcaggtcagggagatcacgttcctgaaaaacacggtgatggagtgtgacgcgtgcgggatgcagcagtcagtacgcaccggcctacccagcgtgcggcccctgctccactgcgcgcccggcttctgcttccccggcgtggcctgcatccagacggagagcggcggccgctgcggcccctgccccgcgggcttcacgggcaacggctcgcactgcaccgacgtcaacgagtgcaacgcccacccctgcttcccccgagtccgctgtatcaacaccagcccggggttccgctgcgaggcttgcccgccggggtacagcggccccacccaccagggcgtggggctggctttcgccaaggccaacaagcaggtttgcacggacatcaacgagtgtgagaccgggcaacataactgcgtccccaactccgtgtgcatcaacacccggggctccttccagtgcggcccgtgccagcccggcttcgtgggcgaccaggcgtccggctgccagcgcggcgcacagcgcttctgccccgacggctcgcccagcgagtgccacgagcatgcagactgcgtcctagagcgcgatggctcgcggtcgtgcgtgtgtcgcgttggctgggccggcaacgggatcctctgtggtcgcgacactgacctagacggcttcccggacgagaagctgcgctgcccggagccgcagtgccgtaaggacaactgcgtgactgtgcccaactcagggcaggaggatgtggaccgcgatggcatcggagacgcctgcgatccggatgccgacggggacggggtccccaatgaaaaggacaactgcccgctggtgcggaacccagaccagcgcaacacggacgaggacaagtggggcgatgcgtgcgacaactgccggtcccagaagaacgacgaccaaaaggacacagaccaggacggccggggcgatgcgtgcgacgacgacatcgacggcgaccggatccgcaaccaggccgacaactgccctagggtacccaactcagaccagaaggacagtgatggcgatggtataggggatgcctgtgacaactgtccccagaagagcaacccggatcaggcggatgtggaccacgactttgtgggagatgcttgtgacagcgatcaagaccaggatggagacggacatcaggactctcgggacaactgtcccacggtgcctaacagtgcccaggaggactcagaccacgatggccagggtgatgcctgcgacgacgacgacgacaatgacggagtccctgacagtcgggacaactgccgcctggtgcctaaccccggccaggaggacgcggacagggacggcgtgggcgacgtgtgccaggacgactttgatgcagacaaggtggtagacaagatcgacgtgtgtccggagaacgctgaagtcacgctcaccgacttcagggccttccagacagtcgtgctggacccggagggtgacgcgcagattgaccccaactgggtggtgctcaaccagggaagggagatcgtgcagacaatgaacagcgacccaggcctggctgtgggttacactgccttcaatggcgtggacttcgagggcacgttccatgtgaacacggtcacggatgacgactatgcgggcttcatctttggctaccaggacagctccagcttctacgtggtcatgtggaagcagatggagcaaacgtattggcaggcgaaccccttccgtgctgtggccgagcctggcatccaactcaaggctgtgaagtcttccacaggccccggggaacagctgcggaacgctctgtggcatacaggagacacagagtcccaggtgcggctgctgtggaaggacccgcgaaacgtgggttggaaggacaagaagtcctatcgttggttcctgcagcaccggccccaagtgggctacatcagggtgcgattctatgagggccctgagctggtggccgacagcaacgtggtcttggacacaaccatgcggggtggccgcctgggggtcttctgcttctcccaggagaacatcatctgggccaacctgcgttaccgctgcaatgacaccatcccagaggactatgagacccatcagctgcggcaagcctagggaccagggtgaggacccgccggatgacagccaccctcaccgcggctggatgggggctctgcacccagcccaaggggtggccgtcctgagggggaagtgagaagggctcagagaggacaaaataaagtgtgtgtgcaggg

SEQ ID NO: 41 - protein, 757 aa, Homo Sapiens
MVPDTACVLLLTLAALGASGQGQSPLGSDLGPQMLRELQETNAALQDVRDWLRQQVREITFLKNTVMECDACGMQQSVRTGLPSVRPLLHCAPGFCFPGVACIQTESGGRCGPCPAGFTGNGSHCTDVNECNAHPCFPRVRCINTSPGFRCEACPPGYSGPTHQGVGLAFAKANKQVCTDINECETGQHNCVPNSVCINTRGSFQCGPCQPGFVGDQASGCQRGAQRFCPDGSPSECHEHADCVLERDGSRSCVCRVGWAGNGILCGRDTDLDGFPDEKLRCPEPQCRKDNCVTVPNSGQEDVDRDGIGDACDPDADGDGVPNEKDNCPLVRNPDQRNTDEDKWGDACDNCRSQKNDDQKDTDQDGRGDACDDDIDGDRIRNQADNCPRVPNSDQKDSDGDGIGDACDNCPQKSNPDQADVDHDFVGDACDSDQDQDGDGHQDSRDNCPTVPNSAQEDSDHDGQGDACDDDDDNDGVPDSRDNCRLVPNPGQEDADRDGVGDVCQDDFDADKVVDKIDVCPENAEVTLTDFRAFQTVVLDPEGDAQIDPNWVVLNQGREIVQTMNSDPGLAVGYTAFNGVDFEGTFHVNTVTDDDYAGFIFGYQDSSSFYVVMWKQMEQTYWQANPFRAVAEPGIQLKAVKSSTGPGEQLRNALWHTGDTESQVRLLWKDPRNVGWKDKKSYRWFLQHRPQVGYIRVRFYEGPELVADSNVVLDTTMRGGRLGVFCFSQENIIWANLRYRCNDTIPEDYETHQLRQA

SEQ ID NO: 42 - DNA, 1996 bp, Homo Sapiens
  CDS (178)...(1197)
tccggcaacgccaaccgctccgctgcgcgcaggctgggctgcaggctctcggctgcagcgctgggctggtgtgcagtggtgcgaccacggctcacggcagcctcagccacccagatgtaagcgatctggttcccacctcagcctcccgagtagtggatctaggatccggcttccaacatgtggcagctctgggcctccctctgctgcctgctggtgttggccaatgcccggagcaggccctctttccatcccctgtcggatgagctggtcaactatgtcaacaaacggaataccacgtggcaggccgggcacaacttctacaacgtggacatgagctacttgaagaggctatgtggtaccttcctgggtgggcccaagccaccccagagagttatgtttaccgaggacctgaagctgcctgcaagcttcgatgcacgggaacaatggccacagtgtcccaccatcaaagagatcagagaccagggctcctgtggctcctgctgggccttcggggctgtggaagccatctctgaccggatctgcatccacaccaatgcgcacgtcagcgtggaggtgtcggcggaggacctgctcacatgctgtggcagcatgtgtggggacggctgtaatggtggctatcctgctgaagcttggaacttctggacaagaaaaggcctggtttctggtggcctctatgaatcccatgtagggtgcagaccgtactccatccctccctgtgagcaccacgtcaacggctcccggcccccatgcacgggggagggagatacccccaagtgtagcaagatctgtgagcctggctacagcccgacctacaaacaggacaagcactacggatacaattcctacagcgtctccaatagcgagaaggacatcatggccgagatctacaaaaacggccccgtggagggagctttctctgtgtattcggacttcctgctctacaagtcaggagtgtaccaacacgtcaccggagagatgatgggtggccatgccatccgcatcctgggctggggagtggagaatggcacaccctactggctggttgccaactcctggaacactgactggggtgacaatggcttctttaaaatactcagaggacaggatcactgtggaatcgaatcagaagtggtggctggaattccacgcaccgatcagtactgggaaaagatctaatctgccgtgggcctgtcgtgccagtcctgggggcgagatcggggtagaaatgcattttattctttaagttcacgtaagatacaagtttcaggcagggtctgaaggactggattggccaaacatcagacctgtcttccaaggagaccaagtcctggctacatcccagcctgtggttacagtgcagacaggccatgtgagccaccgctgccagcacagagcgtccttccccctgtagactagtgccgtgggagtacctgctgcccagctgctgtggccccctccgtgatccatccatctccagggagcaagacagagacgcaggatggaaagcggagttcctaacaggatgaaagttcccccatcagttcccccagtacctccaagcaagtagctttccacatttgtcacagaaatcagaggagagatggtgttgggagccctttggagaacgccagtctccaggtccccctgcatctatcgagtttgcaatgtcacaacctctctgatcttgtgctcagcatgattctttaatagaagttttatttttcgtgcactctgctaatcatgtgggtgagccagtggaacagcgggagcctgtgctggtttgcagattgcctcctaatgacgcggctcaaaaggaaaccaagtggtcaggagttgtttctgacccactgatctctactaccacaaggaaaatagtttaggagaaaccagcttttactgtttttgaaaaattacagcttcaccctgtcaagttaacaaggaatgcctgtgccaataaaaggtttctccaacttga

SEQ ID NO: 43 - protein, 339 aa, Homo Sapiens
MWQLWASLCCLLVLANARSRPSFHPLSDELVNYVNKRNTTWQAGHNFYNVDMSYLKRLCGTFLGGPKPPQRVMFTEDLKLPASFDAREQWPQCPTIKEIRDQGSCGSCWAFGAVEAISDRICIHTNAHVSVEVSAEDLLTCCGSMCGDGCNGGYPAEAWNFWTRKGLVSGGLYESHVGCRPYSIPPCEHHVNGSRPPCTGEGDTPKCSKICEPGYSPTYKQDKHYGYNSYSVSNSEKDIMAEIYKNGPVEGAFSVYSDFLLYKSGVYQHVTGEMMGGHAIRILGWGVENGTPYWLVANSWNTDWGDNGFFKILRGQDHCGIESEVVAGIPRTDQYWEKI

SEQ ID NO: 44 - DNA, 1103 bp, Homo Sapiens
  CDS (80)...(403)
cacagagcccgggccgcaggcacctcctcgccagctcttccgctcctctcacagccgccagacccgcctgctgagccccatggcccgcgctgctctctccgccgcccccagcaatccccggctcctgcgagtggcactgctgctcctgctcctggtagccgctggccggcgcgcagcaggagcgtccgtggccactgaactgcgctgccagtgcttgcagaccctgcagggaattcaccccaagaacatccaaagtgtgaacgtgaagtcccccggaccccactgcgcccaaaccgaagtcatagccacactcaagaatgggcggaaagcttgcctcaatcctgcatcccccatagttaagaaaatcatcgaaaagatgctgaacagtgacaaatccaactgaccagaagggaggaggaagctcactggtggctgttcctgaaggaggccctgcccttataggaacagaagaggaaagagagacacagctgcagaggccacctggattgtgcctaatgtgtttgagcatcgcttaggagaagtcttctatttatttatttattcattagttttgaagattctatgttaatattttaggtgtaaaataattaagggtatgattaactctacctgcacactgtcctattatattcattctttttgaaatgtcaaccccaagttagttcaatctggattcatatttaatttgaaggtagaatgttttcaaatgttctccagtcattatgttaatatttctgaggagcctgcaacatgccagccactgtgatagaggctggcggatccaagcaaatggccaatgagatcattgtgaaggcaggggaatgtatgtgcacatctgttttgtaactgtttagatgaatgtcagttgttatttattgaaatgatttcacagtgtgtggtcaacatttctcatgttgaaactttaagaactaaaatgttctaaatatcccttggacattttatgtctttcttgtaaggcatactgccttgtttaatggtagttttacagtgtttctggcttagaacaaaggggcttaattattgatgttttcatagagaatataaaaataaagcacttatag

SEQ ID NO: 45 - protein, 107 aa, Homo Sapiens
MARAALSAAPSNPRLLRVALLLLLLVAAGRRAAGASVATELRCQCLQTLQGIHPKNIQSVNVKSPGPHCAQTEVIATLKNGRKACLNPASPIVKKIIEKMLNSDKSN

SEQ ID NO: 46 - DNA, 927 bp, Homo Sapiens
  CDS (202)...(546)
ggaagtttaggttaactgtcttaaatttccaaagctgtaatcattattttcattctcaaagtgatggccttgtgttttgctcctctcctccagggccagactgagcccaggttgatttcaggcggacaccaatagactccacagcagctccaggagcccagacaccggcggccagaagcaaggctaggagctgctgcagccatgtcggccctcagcctcctcattctgggcctgctcacggcagtgccacctgccagctgtcagcaaggcctggggaaccttcagccctggatgcagggccttatcgcggtggccgtgttcctggtcctcgttgcaatcgcctttgcagtcaaccacttctggtgccaggaggagccggagcctgcacacatgatcctgaccgtcggaaacaaggcagatggagtcctggtgggaacagatggaaggtactcttcgatggcggccagtttcaggtccagtgagcatgagaatgcctatgagaatgtgcccgaggaggaaggcaaggtccgcagcaccccgatgtaaccttctctgtggctccaaccccaagactcccaggcacatgggatggatgtccagtgctaccacccaagccccctccttctttgtgtggaatctgcaatagtgggctgactccctccagccccatgccggccctacccgcccttgaagtatagccagccaaggttggagctcagaccgtgtctaggttggggctcggctgtggccctggggtctcctgctcagctcagaagagccttctggagaggacagtcagctgagcacctcccatcctgctcacacgtccttccccataactatggaaatggccctaatttctgtgaaataaagactttttgtatttctggggctgaggctcagcaacagcccctcaggcttccaaaa

SEQ ID NO: 47 - protein, 114 aa, Homo Sapiens
MSALSLLILGLLTAVPPASCQQGLGNLQPWMQGLIAVAVFLVLVAIAFAVNHFWCQEEPEPAHMILTVGNKADGVLVGTDGRYSSMAASFRSSEHENAYENVPEEEGKVRSTPM

SEQ ID NO: 48 - DNA, 9645 bp, Homo Sapiens
  CDS (1)...(8487)
atgcccaagcgcgcgcactggggggccctctccgtggtgctgatcctgctttggggccatccgcgagtggcgctggcctgcccgcatccttgtgcctgctacgtccccagcgaggtccactgcacgttccgatccctggcttccgtgcccgctggcattgctagacacgtggaaagaatcaatttggggtttaatagcatacaggccctgtcagaaacctcatttgcaggactgaccaagttggagctacttatgattcacggcaatgagatcccaagcatccccgatggagctttaagagacctcagctctcttcaggttttcaagttcagctacaacaagctgagagtgatcacaggacagaccctccagggtctctctaacttaatgaggctgcacattgaccacaacaagatcgagtttatccaccctcaagctttcaacggcttaacgtctctgaggctactccatttggaaggaaatctcctccaccagctgcaccccagcaccttctccacgttcacatttttggattatttcagactctccaccataaggcacctctacttagcagagaacatggttagaactcttcctgccagcatgcttcggaacatgccgcttctggagaatctttacttgcagggaaatccgtggacctgcgattgtgagatgagatggtttttggaatgggatgcaaaatccagaggaattctgaagtgtaaaaaggacaaagcttatgaaggcggtcagttgtgtgcaatgtgcttcagtccaaagaagttgtacaaacatgagatacacaagctgaaggacatgacttgtctgaagccttcaatagagtcccctctgagacagaacaggagcaggagtattgaggaggagcaagaacaggaagaggatggtggcagccagctcatcctggagaaattccaactgccccagtggagcatctctttgaatatgaccgacgagcacgggaacatggtgaacttggtctgtgacatcaagaaaccaatggatgtgtacaagattcacttgaaccaaacggatcctccagatattgacataaatgcaacagttgccttggactttgagtgtccaatgacccgagaaaactatgaaaagctatggaaattgatagcatactacagtgaagttcccgtgaagctacacagagagctcatgctcagcaaagaccccagagtcagctaccagtacaggcaggatgctgatgaggaagctctttactacacaggtgtgagagcccagattcttgcagaaccagaatgggtcatgcagccatccatagatatccagctgaaccgacgtcagagtacggccaagaaggtgctactttcctactacacccagtattctcaaacaatatccaccaaagatacaaggcaggctcggggcagaagctgggtaatgattgagcctagtggagctgtgcaaagagatcagactgtcctggaagggggtccatgccagttgagctgcaacgtgaaagcttctgagagtccatctatcttctgggtgcttccagatggctccatcctgaaagcgcccatggatgacccagacagcaagttctccattctcagcagtggctggctgaggatcaagtccatggagccatctgactcaggcttgtaccagtgcattgctcaagtgagggatgaaatggaccgcatggtatatagggtacttgtgcagtctccctccactcagccagccgagaaagacacagtgacaattggcaagaacccaggggagtcggtgacattgccttgcaatgctttagcaatacccgaagcccaccttagctggattcttccaaacagaaggataattaatgatttggctaacacatcacatgtatacatgttgccaaatggaactctttccatcccaaaggtccaagtcagtgatagtggttactacagatgtgtggctgtcaaccagcaaggggcagaccattttacggtgggaatcacagtgaccaagaaagggtctggcttgccatccaaaagaggcagacgcccaggtgcaaaggctctttccagagtcagagaagacatcgtggaggatgaagggggctcgggcatgggagatgaagagaacacttcaaggagacttctgcatccaaaggaccaagaggtgttcctcaaaacaaaggatgatgccatcaatggagacaagaaagccaagaaagggagaagaaagctgaaactctggaagcattcggaaaaagaaccagagaccaatgttgcagaaggtcgcagagtgtttgaatctagacgaaggataaacatggcaaacaaacagattaatccggagcgctgggctgatattttagccaaagtccgtgggaaaaatctccctaagggcacagaagtacccccgttgattaaaaccacaagtcctccatccttgagcctagaagtcacaccaccttttcctgctgtttctcccccctcagcatctcctgtgcagacagtaaccagtgctgaagaatcctcagcagatgtacctctacttggtgaagaagagcacgttttgggtaccatttcctcagccagcatggggctagaacacaaccacaatggagttattcttgttgaacctgaagtaacaagcacacctctggaggaagttgttgatgacctttctgagaagactgaggagataacttccactgaaggagacctgaaggggacagcagcccctacacttatatctgagccttatgaaccatctcctactctgcacacattagacacagtctatgaaaagcccacccatgaagagacggcaacagagggttggtctgcagcagatgttggatcgtcaccagagcccacatccagtgagtatgagcctccattggatgctgtctccttggctgagtctgagcccatgcaatactttgacccagatttggagactaagtcacaaccagatgaggataagatgaaagaagacacctttgcacaccttactccaacccccaccatctgggttaatgactccagtacatcacagttatttgaggattctactataggggaaccaggtgtcccaggccaatcacatctacaaggactgacagacaacatccaccttgtgaaaagtagtctaagcactcaagacaccttactgattaaaaagggtatgaaagagatgtctcagacactacagggaggaaatatgctagagggagaccccacacactccagaagttctgagagtgagggccaagagagcaaatccatcactttgcctgactccacactgggtataatgagcagtatgtctccagttaagaagcctgcggaaaccacagttggtaccctcctagacaaagacaccacaacagtaacaacaacaccaaggcaaaaagttgctccgtcatccaccatgagcactcacccttctcgaaggagacccaacgggagaaggagattacgccccaacaaattccgccaccggcacaagcaaaccccacccacaacttttgccccatcagagactttttctactcaaccaactcaagcacctgacattaagatttcaagtcaagtggagagttctctggttcctacagcttgggtggataacacagttaatacccccaaacagttggaaatggagaagaatgcagaacccacatccaagggaacaccacggagaaaacacgggaagaggccaaacaaacatcgatataccccttctacagtgagctcaagagcgtccggatccaagcccagcccttctccagaaaataaacatagaaacattgttactcccagttcagaaactatacttttgcctagaactgtttctctgaaaactgagggcccttatgattccttagattacatgacaaccaccagaaaaatatattcatcttaccctaaagtccaagagacacttccagtcacatataaacccacatcagatggaaaagaaattaaggatgatgttgccacaaatgttgacaaacataaaagtgacattttagtcactggtgaatcaattactaatgccataccaacttctcgctccttggtctccactatgggagaatttaaggaagaatcctctcctgtaggctttccaggaactccaacctggaatccctcaaggacggcccagcctgggaggctacagacagacatacctgttaccacttctggggaaaatcttacagaccctccccttcttaaagagcttgaggatgtggatttcacttccgagtttttgtcctctttgacagtctccacaccatttcaccaggaagaagctggttcttccacaactctctcaagcataaaagtggaggtggcttcaagtcaggcagaaaccaccacccttgatcaagatcatcttgaaaccactgtggctattctcctttctgaaactagaccacagaatcacacccctactgctgcccggatgaaggagccagcatcctcgtccccatccacaattctcatgtctttgggacaaaccaccaccactaagccagcacttcccagtccaagaatatctcaagcatctagagattccaaggaaaatgttttcttgaattatgtggggaatccagaaacagaagcaaccccagtcaacaatgaaggaacacagcatatgtcagggccaaatgaattatcaacaccctcttccgaccgggatgcatttaacttgtctacaaagctggaattggaaaagcaagtatttggtagtaggagtctaccacgtggcccagatagccaacgccaggatggaagagttcatgcttctcatcaactaaccagagtccctgccaaacccatcctaccaacagcaacagtgaggctacctgaaatgtccacacaaagcgcttccagatactttgtaacttcccagtcacctcgtcactggaccaacaaaccggaaataactacatatccttctggggctttgccagagaacaaacagtttacaactccaagattatcaagtacaacaattcctctcccattgcacatgtccaaacccagcattcctagtaagtttactgaccgaagaactgaccaattcaatggttactccaaagtgtttggaaataacaacatccctgaggcaagaaacccagttggaaagcctcccagtccaagaattcctcattattccaatggaagactccctttctttaccaacaagactctttcttttccacagttgggagtcacccggagaccccagatacccacttctcctgccccagtaatgagagagagaaaagttattccaggttcctacaacaggatacattcccatagcaccttccatctggactttggccctccggcacctccgttgttgcacactccgcagaccacgggatcaccctcaactaacttacagaatatccctatggtctcttccacccagagttctatctcctttataacatcttctgtccagtcctcaggaagcttccaccagagcagctcaaagttctttgcaggaggacctcctgcatccaaattctggtctcttggggaaaagccccaaatcctcaccaagtccccacagactgtgtccgtcaccgctgagacagacactgtgttcccctgtgaggcaacaggaaaaccaaagcctttcgttacttggacaaaggtttccacaggagctcttatgactccgaataccaggatacaacggtttgaggttctcaagaacggtaccttagtgatacggaaggttcaagtacaagatcgaggccagtatatgtgcaccgccagcaacctgcacggcctggacaggatggtggtcttgctttcggtcaccgtgcagcaacctcaaatcctagcctcccactaccaggacgtcactgtctacctgggagacaccattgcaatggagtgtctggccaaagggaccccagccccccaaatttcctggatcttccctgacaggagggtgtggcaaactgtgtcccccgtggagagccgcatcaccctgcacgaaaaccggaccctttccatcaaggaggcgtccttctcagacagaggcgtctataagtgcgtggccagcaatgcagccggggcggacagcctggccatccgcctgcacgtggcggcactgccccccgttatccaccaggagaagctggagaacatctcgctgcccccggggctcagcattcacattcactgcactgccaaggctgcgcccctgcccagcgtgcgctgggtgctcggggacggtacccagatccgcccctcgcagttcctccacgggaacttgtttgttttccccaacgggacgctctacatccgcaacctcgcgcccaaggacagcgggcgctatgagtgcgtggccgccaacctggtaggctccgcgcgcaggacggtgcagctgaacgtgcagcgtgcagcagccaacgcgcgcatcacgggcacctccccgcggaggacggacgtcaggtacggaggaaccctcaagctggactgcagcgcctcgggggacccctggccgcgcatcctctggaggctgccgtccaagaggatgatcgacgcgctcttcagttttgatagcagaatcaaggtgtttgccaatgggaccctggtggtgaaatcagtgacggacaaagatgccggagattacctgtgcgtagctcgaaataaggttggtgatgactacgtggtgctcaaagtggatgtggtgatgaaaccggccaagattgaacacaaggaggagaacgaccacaaagtcttctacgggggtgacctgaaagtggactgtgtggccaccgggcttcccaatcccgagatctcctggagcctcccagacgggagtctggtgaactccttcatgcagtcggatgacagcggtggacgcaccaagcgctatgtcgtcttcaacaatgggacactctactttaacgaagtggggatgagggaggaaggagactacacctgctttgctgaaaatcaggtcgggaaggacgagatgagagtcagagtcaaggtggtgacagcgcccgccaccatccggaacaagacttacttggcggttcaggtgccctatggagacgtggtcactgtagcctgtgaggccaaaggagaacccatgcccaaggtgacttggttgtccccaaccaacaaggtgatccccacctcctctgagaagtatcagatataccaagatggcactctccttattcagaaagcccagcgttctgacagcggcaactacacctgcctggtcaggaacagcgcgggagaggataggaagacggtgtggattcacgtcaacgtccagccacccaagatcaacggtaaccccaaccccatcaccaccgtgcgggagatagcagccgggggcagtcggaaactgattgactgcaaagctgaaggcatccccaccccgagggtgttatgggcttttcccgagggtgtggttctgccagctccatactatggaaaccggatcactgtccatggcaacggttccctggacatcaggagtttgaggaagagcgactccgtccagctggtatgcatggcacgcaacgagggaggggaggcgaggttgatcgtgcagctcactgtcctggagcccatggagaaacccatcttccacgacccgatcagcgagaagatcacggccatggcgggccacaccatcagcctcaactgctctgccgcggggaccccgacacccagcctggtgtgggtccttcccaatggcaccgatctgcagagtggacagcagctgcagcgcttctaccacaaggctgacggcatgctacacattagcggtctctcctcggtggacgctggggcctaccgctgcgtggcccgcaatgccgctggccacacggagaggctggtctccctgaaggtgggactgaagccagaagcaaacaagcagtatcataacctggtcagcatcatcaatggtgagaccctgaagctcccctgcacccctcccggggctgggcagggacgtttctcctggacgctccccaatggcatgcatctggagggcccccaaaccctgggacgcgtttctcttctggacaatggcaccctcacggttcgtgaggcctcggtgtttgacaggggtacctatgtatgcaggatggagacggagtacggcccttcggtcaccagcatccccgtgattgtgatcgcctatcctccccggatcaccagcgagcccaccccggtcatctacacccggcccgggaacaccgtgaaactgaactgcatggctatggggattcccaaagctgacatcacgtgggagttaccggataagtcgcatctgaaggcaggggttcaggctcgtctgtatggaaacagatttcttcacccccagggatcactgaccatccagcatgccacacagagagatgccggcttctacaagtgcatggcaaaaaacattctcggcagtgactccaaaacaacttacatccacgtcttctgaaatgtggattccagaatgattgcttaggaactgacaacaaagcggggtttgtaagggaagccaggttggggaataggagctcttaaataatgtgtcacagtgcatggtggcctctggtgggtttcaagttgaggttgatcttgatctacaattgttgggaaaaggaagcaatgcagacacgagaaggagggctcagccttgctgagacactttcttttgtgtttacatcatgccaggggcttcattcagggtgtctgtgctctgactgcaatttttcttcttttgcaaatgccactcgactgccttcataagcgtccataggatatctgaggaacattcatcaaaaataagccatagacatgaacaacacctcactaccccattgaagacgcatcacctagttaacctgctgcagtttttacatgatagactttgttccagattgacaagtcatctttcagttatttcctctgtcacttcaaaactccagcttgcccaataaggatttagaaccagagtgactgatatatatatatatattttaattcagagttacatacatacagctaccattttatatgaaaaaagaaaaacatttcttcctggaactcactttttatataatgttttatatatatattttttcctttcaaatcagacgatgagactagaaggagaaatactttctgtcttattaaaattaataaattattggtctttacaagacttggatacattacagcagacatggaaatataattttaaaaaatttctctccaacctccttcaaattcagtcaccactgttatattaccttctccaggaaccctccagtggggaaggctgcgatattagatttccttgtatgcaaagtttttgttgaaagctgtgctcagaggaggtgagaggagaggaaggagaaaactgcatcataactttacagaattgaatctagagtcttccccgaaaagcccagaaacttctctgcagtatctggcttgtccatctggtctaaggtggctgcttcttccccagccatgagtcagtttgtgcccatgaataatacacgacctgttatttccatgactgctttactgtatttttaaggtcaatatactgtacatttgataataaaataatattctcccaaaaaaaaaa

SEQ ID NO: 49 - protein, 2828 aa, Homo Sapiens
MPKRAHWGALSVVLILLWGHPRVALACPHPCACYVPSEVHCTFRSLASVPAGIARHVERINLGFNSIQALSETSFAGLTKLELLMIHGNEIPSIPDGALRDLSSLQVFKFSYNKLRVITGQTLQGLSNLMRLHIDHNKIEFIHPQAFNGLTSLRLLHLEGNLLHQLHPSTFSTFTFLDYFRLSTIRHLYLAENMVRTLPASMLRNMPLLENLYLQGNPWTCDCEMRWFLEWDAKSRGILKCKKDKAYEGGQLCAMCFSPKKLYKHEIHKLKDMTCLKPSIESPLRQNRSRSIEEEQEQEEDGGSQLILEKFQLPQWSISLNMTDEHGNMVNLVCDIKKPMDVYKIHLNQTDPPDIDINATVALDFECPMTRENYEKLWKLIAYYSEVPVKLHRELMLSKDPRVSYQYRQDADEEALYYTGVRAQILAEPEWVMQPSIDIQLNRRQSTAKKVLLSYYTQYSQTISTKDTRQARGRSWVMIEPSGAVQRDQTVLEGGPCQLSCNVKASESPSIFWVLPDGSILKAPMDDPDSKFSILSSGWLRIKSMEPSDSGLYQCIAQVRDEMDRMVYRVLVQSPSTQPAEKDTVTIGKNPGESVTLPCNALAIPEAHLSWILPNRRIINDLANTSHVYMLPNGTLSIPKVQVSDSGYYRCVAVNQQGADHFTVGITVTKKGSGLPSKRGRRPGAKALSRVREDIVEDEGGSGMGDEENTSRRLLHPKDQEVFLKTKDDAINGDKKAKKGRRKLKLWKHSEKEPETNVAEGRRVFESRRRINMANKQINPERWADILAKVRGKNLPKGTEVPPLIKTTSPPSLSLEVTPPFPAVSPPSASPVQTVTSAEESSADVPLLGEEEHVLGTISSASMGLEHNHNGVILVEPEVTSTPLEEVVDDLSEKTEEITSTEGDLKGTAAPTLISEPYEPSPTLHTLDTVYEKPTHEETATEGWSAADVGSSPEPTSSEYEPPLDAVSLAESEPMQYFDPDLETKSQPDEDKMKEDTFAHLTPTPTIWVNDSSTSQLFEDSTIGEPGVPGQSHLQGLTDNIHLVKSSLSTQDTLLIKKGMKEMSQTLQGGNMLEGDPTHSRSSESEGQESKSITLPDSTLGIMSSMSPVKKPAETTVGTLLDKDTTTVTTTPRQKVAPSSTMSTHPSRRRPNGRRRLRPNKFRHRHKQTPPTTFAPSETFSTQPTQAPDIKISSQVESSLVPTAWVDNTVNTPKQLEMEKNAEPTSKGTPRRKHGKRPNKHRYTPSTVSSRASGSKPSPSPENKHRNIVTPSSETILLPRTVSLKTEGPYDSLDYMTTTRKIYSSYPKVQETLPVTYKPTSDGKEIKDDVATNVDKHKSDILVTGESITNAIPTSRSLVSTMGEFKEESSPVGFPGTPTWNPSRTAQPGRLQTDIPVTTSGENLTDPPLLKELEDVDFTSEFLSSLTVSTPFHQEEAGSSTTLSSIKVEVASSQAETTTLDQDHLETTVAILLSETRPQNHTPTAARMKEPASSSPSTILMSLGQTTTTKPALPSPRISQASRDSKENVFLNYVGNPETEATPVNNEGTQHMSGPNELSTPSSDRDAFNLSTKLELEKQVFGSRSLPRGPDSQRQDGRVHASHQLTRVPAKPILPTATVRLPEMSTQSASRYFVTSQSPRHWTNKPEITTYPSGALPENKQFTTPRLSSTTIPLPLHMSKPSIPSKFTDRRTDQFNGYSKVFGNNNIPEARNPVGKPPSPRIPHYSNGRLPFFTNKTLSFPQLGVTRRPQIPTSPAPVMRERKVIPGSYNRIHSHSTFHLDFGPPAPPLLHTPQTTGSPSTNLQNIPMVSSTQSSISFITSSVQSSGSFHQSSSKFFAGGPPASKFWSLGEKPQILTKSPQTVSVTAETDTVFPCEATGKPKPFVTWTKVSTGALMTPNTRIQRFEVLKNGTLVIRKVQVQDRGQYMCTASNLHGLDRMVVLLSVTVQQPQILASHYQDVTVYLGDTIAMECLAKGTPAPQISWIFPDRRVWQTVSPVESRITLHENRTLSIKEASFSDRGVYKCVASNAAGADSLAIRLHVAALPPVIHQEKLENISLPPGLSIHIHCTAKAAPLPSVRWVLGDGTQIRPSQFLHGNLFVFPNGTLYIRNLAPKDSGRYECVAANLVGSARRTVQLNVQRAAANARITGTSPRRTDVRYGGTLKLDCSASGDPWPRILWRLPSKRMIDALFSFDSRIKVFANGTLVVKSVTDKDAGDYLCVARNKVGDDYVVLKVDVVMKPAKIEHKEENDHKVFYGGDLKVDCVATGLPNPEISWSLPDGSLVNSFMQSDDSGGRTKRYVVFNNGTLYFNEVGMREEGDYTCFAENQVGKDEMRVRVKVVTAPATIRNKTYLAVQVPYGDVVTVACEAKGEPMPKVTWLSPTNKVIPTSSEKYQIYQDGTLLIQKAQRSDSGNYTCLVRNSAGEDRKTVWIHVNVQPPKINGNPNPITTVREIAAGGSRKLIDCKAEGIPTPRVLWAFPEGVVLPAPYYGNRITVHGNGSLDIRSLRKSDSVQLVCMARNEGGEARLIVQLTVLEPMEKPIFHDPISEKITAMAGHTISLNCSAAGTPTPSLVWVLPNGTDLQSGQQLQRFYHKADGMLHISGLSSVDAGAYRCVARNAAGHTERLVSLKVGLKPEANKQYHNLVSIINGETLKLPCTPPGAGQGRFSWTLPNGMHLEGPQTLGRVSLLDNGTLTVREASVFDRGTYVCRMETEYGPSVTSIPVIVIAYPPRITSEPTPVIYTRPGNTVKLNCMAMGIPKADITWELPDKSHLKAGVQARLYGNRFLHPQGSLTIQHATQRDAGFYKCMAKNILGSDSKTTYIHVF

SEQ ID NO: 50 - DNA, 1738 bp, Homo Sapiens
  CDS (296)...(1531)
cgggggggtactgtgcgagccctcaaggaggtggctgttctgtagctggagagctccgtgggtggcaggactgaacttgaacaccagaaacaacccccaagccttgtgacctgggaggcaggaggcgggtctgtctccctgggacttgggtggctgagccgaggtactcgggaccctgtcccgcgcatggcagagtggctcctcacagcctgaagctcatccttctgcacgggccagccaggccagcacagaggcaccagggcagcagtgcacacaggtccccggggaccccaccatgtggagcggatggtggctgtggccccttgtggccgtctgcactgcagacttctttcgggacgaggcagagaggatcatgagggactcccctgtcattgatgggcacaatgacctcccctggcagctgctggatatgttcaacaaccggctgcaggacgagagggccaacctgaccaccttggccggcacacacaccaacatccccaagctgagggccggctttgtgggaggccagttctggtccgtgtacacgccctgcgacacccagaacaaagacgccgtgcggaggacgctggagcagatggacgtggtccaccgcatgtgccggatgtacccggagaccttcctgtatgtcaccagcagtgcaggcattcggcaggccttccgggaagggaaggtggccagcctgatcggcgtggagggcggccactccattgacagcagtttgggcgtcctgcgggcactctatcagctgggcatgcggtacctgaccctcacccacagctgcaacacgccctgggctgacaactggctggtggacacgggagacagcgagccccagagccaaggcttgtcaccctttgggcagcgtgtggtgaaggagctgaaccgtctgggggtcctcatcgacttggctcacgtgtctgtggccaccatgaaggccaccctgcagctgtccagagccccggtcatcttcagccactcctcggcctacagcgtgtgcgcaagccggcgcaacgtgcctgacgacgtcctgaggctggtgaaacagacagacagcctggtgatggtgaacttctacaacaattacatttcctgcaccaacaaggccaacctgtcccaagtggccgaccatctggatcacatcaaggaggtggcaggagccagagccgtgggttttggtggggactttgatggtgttccaagggtccctgaggggctggaggacgtctccaagtatccagacctgatcgctgagctgctcaggaggaactggacggaggcggaggtcaagggcgcactggctgacaacctgctgagggtcttcgaggctgtggaacaggccagcaacctcacacaggctcccgaggaggagcccatcccgctggaccagctgggtggctcctgcaggacccattacggctactcctctggggcttccagcctccatcgccactgggggctcctgctggcctccctcgctcccctggtcctctgtctgtctctcctgtgaaacctgggagaccagagtcccctttagggttcccggagctccgggaagacccgcccatcccaggactccagatgccaggagccctgctgcccacatgcaaggaccagcatctcctgagaggacgcctgggcttacctggggggcaggatgcctggggacagttcaggacacacacacagtaggcccgcaataaaagcaacacccctt

SEQ ID NO: 51 - protein, 411 aa, Homo Sapiens
MWSGWWLWPLVAVCTADFFRDEAERIMRDSPVIDGHNDLPWQLLDMFNNRLQDERANLTTLAGTHTNIPKLRAGFVGGQFWSVYTPCDTQNKDAVRRTLEQMDVVHRMCRMYPETFLYVTSSAGIRQAFREGKVASLIGVEGGHSIDSSLGVLRALYQLGMRYLTLTHSCNTPWADNWLVDTGDSEPQSQGLSPFGQRVVKELNRLGVLIDLAHVSVATMKATLQLSRAPVIFSHSSAYSVCASRRNVPDDVLRLVKQTDSLVMVNFYNNYISCTNKANLSQVADHLDHIKEVAGARAVGFGGDFDGVPRVPEGLEDVSKYPDLIAELLRRNWTEAEVKGALADNLLRVFEAVEQASNLTQAPEEEPIPLDQLGGSCRTHYGYSSGASSLHRHWGLLLASLAPLVLCLSLL

SEQ ID NO: 52 - DNA, 4627 bp, Homo Sapiens
  CDS (167)...(676)
tcacttgcctgatatttccagtgtcagagggacacagccaacgtggggtcccttctaggctgacagccgctctccagccactgccgcgagcccgtctgctcccgccctgcccgtgcactctccgcagccgccctccgccaagccccagcgcccgctcccatcgccgatgaccgcggggaggaggatggagatgctctgtgccggcagggtccctgcgctgctgctctgcctgggtttccatcttctacaggcagtcctcagtacaactgtgattccatcatgtatcccaggagagtccagtgataactgcacagctttagttcagacagaagacaatccacgtgtggctcaagtgtcaataacaaagtgtagctctgacatgaatggctattgtttgcatggacagtgcatctatctggtggacatgagtcaaaactactgcaggtgtgaagtgggttatactggtgtccgatgtgaacacttctttttaaccgtccaccaacctttaagcaaagagtatgtggctttgaccgtgattcttattattttgtttcttatcacagtcgtcggttccacatattatttctgcagatggtacagaaatcgaaaaagtaaagaaccaaagaaggaatatgagagagttacctcaggggatccagagttgccgcaagtctgaatggcgccatcaaacttatgggcagggataacagtgtgcctggttaatattaatattccattttattaataatatttatgttgggtcaagtgttaggtcaataacactgtattttaatgtacttgaaaaatgtttttatttttgttttatttttgacagactatttgctaatgtataatgtgcagaaaatatttaatatcaaaagaaaattgatatttttatacaagtaatttcctgagctaaatgcttcattgaaagcttcaaagtttatatgcctggtgcacagtgcttagaagtaagcaattcccaggtcatagctcaagaattgttagcaaatgacagatttctgtaagcctatatatatagtcaaatcgatttagtaagtatgttttttatgttcctcaaatcagtgataattggtttgactgtaccatggtttgatatgtagttggcaccatggtatcatatattaaaacaataatgcaattagaatttgggagaagcaaatataggtcctgtgttaaacactacacatttgaaacaagctaaccctggggagtctatggtctcttcactcaggtctcagctataattctgttatatgaggggcagtggacagttccctatgccaactcacgactcctacaggtactagtcactcatctaccagattctgcctatgtaaaatgaattgaaaaacaattttctgtaatcttttatttaagtagtgggcatttcatagcttcacaatgttccttttttgtatattacaacatttatgtgaggtaattattgctcaacagacaattagaaaaaagtccacacttgaagcctaaatttgtgctttttaagaatatttttagactatttctttttataggggctttgctgaattctaacattaaatcacagcccaaaatttgatggactaattattattttaaaatatatgaagacaataattctacatgttgtcttaagatggaaatacagttatttcatcttttattcaaggaagttttaactttaatacagctcagtaaatggcttcttctagaatgtaaagttatgtatttaaagttgtatcttgacacaggaaatgggaaaaaacttaaaaattaatatggtgtatttttccaaatgaaaaatctcaattgaaagcttttaaaatgtagaaacttaaacacaccttcctgtggaggctgagatgaaaactagggctcattttcctgacatttgtttattttttggaagagacaaagatttcttctgcactctgagcccataggtctcagagagttaataggagtatttttgggctattgcataaggagccactgctgccaccacttttggattttatgggaggctccttcatcgaatgctaaacctttgagtagagtctccctggatcacataccaggtcagggaggatctgttcttcctctacgtttatcctggcatgtgctagggtaaacgaaggcataataagccatggctgacctctggagcaccaggtgccaggacttgtctccatgtgtatccatgcattatataccctggtgcaatcacacgactgtcatctaaagtcctggccctggcccttactattaggaaaataaacagacaaaaacaagtaaatatatatggtcctatacatattgtatatatattcatatacaaacatgtatgtatacatgaccttaatggatcatagaattgcagtcatttggtgctctgctaaccatttatataaaacttaaaaacaagagaaaagaaaaatcaattagatctaaacagttatttctgtttcctatttaatatagctgaagtcaaaatatgtaagaacacattttaaatactctacttacagttggccctctgtggttagttccacatctgtggattcaaccaaccaaggacggaaaatgcttaaaaaataatacaacaacaacaaaaaatacattataacaactatttacttttttttttttctttttgagatggagtctcgctctgttgcccaggttggagtgcagtggcacgatctcggctcactgcaacctcacctcccgggttcaagagatcctcctgcctcagcctcctgagcagctgggactacaggcgcatgccaccatgcccagctaatttttgtatttttagtagaggcggggtttcaccatgttggccaggatggtctcaatctcctaaccttgagatccaccctccacagcctcccaaactgctgggattacaggcgtgagccaccgcacgtagcatttacattaggtattacaagtaatgtaaagatgatttaagtatacaggaggatgtgaataggttatatgcaagcactatgcccttttatataagtgacttgaacatctgtgcccgattttagtatgtgcaggggggcgatctgggaatcagtcccctgtggataccaaggtacaactgtatttattaacgcttactagatgtgaggagagtctgaatattttcagtgatcttggctgtttcaaaaaaatctattgacttttcaataaatcagctgcaatccatttatttcatttacaaaagatttattgtaagcctctcaatcttggtttttcagttgatcttaagcatgtcaattcataaaaacaagtcatttttgtatttttcatctttaagaatgcttaaaaaagctaatccctaaaatagttagatctttgtaaatgcatattaaataataaagtatgacccacattactttttatgggtgaaaataagacaaaaataatagttttagtgaggatggtgctgagtaaacataaaaactgatttgctctcagctgatgtgtcctgtacacagtgggaagattttagttcacacttagtctaactcccccattttacagatttctcactatatatatttctagaaggggctatgcatattcaatgtattgagaaccaaagcaaccacaaatgcataaatgcataatttatggtcttcaaccaaggccacataataacccagttaacttactctttaaccaggaatattaagttctataactagtactcaaggtttaaccttaaaattaagatttccttaaccttaaccttaaaattgatattatattaaacatacataatacaatgtaactccactgttctcctgaatattttttgctctaatctctctgccgaaagtcaaagtgatgggagaattggtatactggtatgactacgtcttaagtcagatttttatttatgagtctttgagactaaattcaatcaccaccaggtatcaaatcaacttttatgcagcaaatatatgattctagtgtctgacttttgttaaattcagtaatgcagtttttaaaaacctgtatctgacccactttgtaatttttgctccaatatccattctgtagacttttgaaaaaaaagtttttaatttgatgcccaatatattctgaccgttaaaaaattcttgttcatatgggagaagggggagtaatgacttgtacaaacagtatttctggtgtatattttaatgtttttaaaaagagtaatttcatttaaatatctgttattcaaatttgatgatgttaaatgtaatataatgtattttctttttattttgcactctgtaattgcactttttaagtttgaagagccattttggtaaacggtttttattaaagatgctatggaacataaagttgtattgcatgcaatttaaagtaacttatttgactatgaatattatcggattactgaattgtatcaatttgtttgtgttcaatatcagctttgataattgtgtaccttaagatattgaaggagaaaatagataatttacaagatattattaatttttatttatttttcttgggaattgaaaaaaattgaaataaataaaaatgcattgaacatcttgcattcaaaatcttcactgac

SEQ ID NO: 53 - protein, 169 aa, Homo Sapiens
MTAGRRMEMLCAGRVPALLLCLGFHLLQAVLSTTVIPSCIPGESSDNCTALVQTEDNPRVAQVSITKCSSDMNGYCLHGQCIYLVDMSQNYCRCEVGYTGVRCEHFFLTVHQPLSKEYVALTVILIILFLITVVGSTYYFCRWYRNRKSKEPKKEYERVTSGDPELPQV

SEQ ID NO: 54 - DNA, 2814 bp, Homo Sapiens
  CDS (209)...(2491)
aagaacgcccccaaaatctgtttctaattttacagaaatcttttgaaacttggcacggtattcaaaagtccgtggaaagaaaaaaaccttgtcctggcttcagcttccaactacaaagacagacttggtccttttcaacggttttcacagatccagtgacccacgctctgaagacagaattagctaactttcaaaaacatctggaaaaatgaagacttgggtaaaaatcgtatttggagttgccacctctgctgtgcttgccttattggtgatgtgcattgtcttacgcccttcaagagttcataactctgaagaaaatacaatgagagcactcacactgaaggatattttaaatggaacattttcttataaaacattttttccaaactggatttcaggacaagaatatcttcatcaatctgcagataacaatatagtactttataatattgaaacaggacaatcatataccattttgagtaatagaaccatgaaaagtgtgaatgcttcaaattacggcttatcacctgatcggcaatttgtatatctagaaagtgattattcaaagctttggagatactcttacacagcaacatattacatctatgaccttagcaatggagaatttgtaagaggaaatgagcttcctcgtccaattcagtatttatgctggtcgcctgttgggagtaaattagcatatgtctatcaaaacaatatctatttgaaacaaagaccaggagatccaccttttcaaataacatttaatggaagagaaaataaaatatttaatggaatcccagactgggtttatgaagaggaaatgcttcctacaaaatatgctctctggtggtctcctaatggaaaatttttggcatatgcggaatttaatgataaggatataccagttattgcctattcctattatggcgatgaacaatatcctagaacaataaatattccatacccaaaggctggagctaagaatcccgttgttcggatatttattatcgataccacttaccctgcgtatgtaggtccccaggaagtgcctgttccagcaatgatagcctcaagtgattattatttcagttggctcacgtgggttactgatgaacgagtatgtttgcagtggctaaaaagagtccagaatgtttcggtcctgtctatatgtgacttcagggaagactggcagacatgggattgtccaaagacccaggagcatatagaagaaagcagaactggatgggctggtggattctttgtttcaagaccagttttcagctatgatgccatttcgtactacaaaatatttagtgacaaggatggctacaaacatattcactatatcaaagacactgtggaaaatgctattcaaattacaagtggcaagtgggaggccataaatatattcagagtaacacaggattcactgttttattctagcaatgaatttgaagaataccctggaagaagaaacatctacagaattagcattggaagctatcctccaagcaagaagtgtgttacttgccatctaaggaaagaaaggtgccaatattacacagcaagtttcagcgactacgccaagtactatgcacttgtctgctacggcccaggcatccccatttccacccttcatgatggacgcactgatcaagaaattaaaatcctggaagaaaacaaggaattggaaaatgctttgaaaaatatccagctgcctaaagaggaaattaagaaacttgaagtagatgaaattactttatggtacaagatgattcttcctcctcaatttgacagatcaaagaagtatcccttgctaattcaagtgtatggtggtccctgcagtcagagtgtaaggtctgtatttgctgttaattggatatcttatcttgcaagtaaggaagggatggtcattgccttggtggatggtcgaggaacagctttccaaggtgacaaactcctctatgcagtgtatcgaaagctgggtgtttatgaagttgaagaccagattacagctgtcagaaaattcatagaaatgggtttcattgatgaaaaaagaatagccatatggggctggtcctatggaggatacgtttcatcactggcccttgcatctggaactggtcttttcaaatgtggtatagcagtggctccagtctccagctgggaatattacgcgtctgtctacacagagagattcatgggtctcccaacaaaggatgataatcttgagcactataagaattcaactgtgatggcaagagcagaatatttcagaaatgtagactatcttctcatccacggaacagcagatgataatgtgcactttcaaaactcagcacagattgctaaagctctggttaatgcacaagtggatttccaggcaatgtggtactctgaccagaaccacggcttatccggcctgtccacgaaccacttatacacccacatgacccacttcctaaagcagtgtttctctttgtcagactaaaaacgatgcagatgcaagcctgtatcagaatctgaaaaccttatataaacccctcagacagtttgcttattttattttttatgttgtaaaatgctagtataaacaaacaaattaatgttgttctaaaggctgttaaaaaaaagatgaggactcagaagttcaagctaaatattgtttacattttctggtactctgtgaaagaagagaaaagggagtcatgcattttgctttggacacagtgttttatcacctgttcatttgaagaaaaataataaagtcagaagttcaaaaaaaaaaaaaaaaaaaaaaaaagcggccgctcg

SEQ ID NO: 55 - protein, 760 aa, Homo Sapiens [sequence omitted]

SEQ ID NO: 56 - DNA, 2020 bp, Homo Sapiens
  CDS (32)...(523)
tttttaaaagttaaaaaaagacatatcaaacatgcaaatacttgaatccagcaggccaatagtgaaatgtgaacactttctaattctacacttccaggttgacatcagtacacagaaacaggctctaggaaaaatttctaagttcatagcctacgtgtgtgtatgtgtgcgtgttgaaacagaagtgtgtgtgtgtgtgcatgtgtggcgcgtgctcctgcacggcgtgcagttttctgtgtttgtgtgtttgaaagcgtgtgaggatttaactgtgggttttcccttgtattcagtatacgcttttttttttggcgcattggtcaaacggttgttattattagcttctaactttgcactgagtgtcctcgcccttcctttagctaatcctatacattacagagaattcctaggacagggctggcgacaattcatgtgtaaatgtttactcaaggactctgtgactgcgtttaaaaagtacagtgtatatctctggagaaataacatgtatacctacctttagcagctttttattgtggactaatgcaagaaaattattaccagagtattgcaccatttttccatttggaatataaagttaaagagaaaaaaaaaaaaaaaaaaaactgttgttgaactgtggccatagatacttgtaaagaatggatggttccgtggaaggaacagaaacaagcacttgggcgtgggttgtgactgcttttgggggagcctggggtttgggctcccacctgtttacagacctttttttctccttcagactttaaaattttaaaaatttaaaaaggaattaaaaaaaaaaaaagacttccgtcgtaaagaaacctattttcagaatgcagatgcgttccttcagagctctgagacgggacagtgttgttccctcggccatcgtcgtggactctgtcgattgctttcgccccttcgtcaaggtgacaggcgttgtggccactgtcttgcacatgccggacgcgctttcaggaaagccagggctcccgagggcagctccacaccatttcatgtatttttaaacccaactcctagcactgaagatgttatttaaaaaaaaaaaaaacaaaacaaaacaaaaaaatgaaaaaaaagaaaaagaggaaaaaaaaacacaaagaagaaaaatacctaatctctaatgtgtagcagttacatatttaccaaataatggactcaaaagaaatagatgtttgaagagtgctttatatattaaaaattgctttatgttttaaaaatgatcaatgttttgattgttttgcaaggaagaaagacaatggaataacataccttcaagtatgttttaaaaaatatatatatgaacattgtgctccctgcctgcttgatcaggaaacttgtgcattacatttttttaattagctttttaatggttttatcaaaacaaaaaaaatacaaaaaaaaaaaaaaaagtcctgcaagactgcagatccacaaaagctggttttatagaggatcatgaactatgcacaaactgggttcaagactttttttctcaagtttagtaggatatttagaaaaaccaaccttcctcagagtgactgcatctcattgccattacatgcgttctatatattcgatggacatacacctgcgtatgtatatccaatatgtgtgcgtgtgagcatgcgtgtgcgtatgtgcgtccgacataccacttcccgtgctgccggcgagcattgagttgtagaaaaactgttgttttaaaattggggatggaagtcaagaatatgtttgtttgtttttgggttttgttgggtttgaggggttttttgtttgtttgttttttgttttttttagcttttattttgaacttaatatgtctgtaactctgagattaaacaacaagttcgtggctcttaatgttttcctcatagaatgtgactgttgaagaacatgcatcgaaagttgctttcgaaagtacaacgctttattgaatcttaataaattgcaatttttttcttggctgttcaaa

SEQ ID NO: 57 - protein, 163 aa, Homo Sapiens
MQILESSRPIVKCEHFLILHFQVDISTQKQALGKISKFIAYVCVCVRVETEVCVCVHVWRVLLHGVQFSVFVCLKACEDLTVGFPLYSVYAFFFGALVKRLLLLASNFALSVLALPLANPIHYREFLGQGWRQFMCKCLLKDSVTAFKKYSVYLWRNNMYTYL

SEQ ID NO: 58 - DNA, 3802 bp, Homo Sapiens
  CDS (169)...(2520)
aaaaaaaaaaaactttagagaaaggaagggccaaaactacgacttggctttctgaaacggaagcataaatgttcttttcctccatttgtctggatctgagaacctgcatttggtattagctagtggaagcagtatgtatggttgaagtgcattgctgcagctggtagcatgagtggtggccaccagctgcagctggctgccctctggccctggctgctgatggctaccctgcaggcaggctttggacgcacaggactggtactggcagcagcggtggagtctgaaagatcagcagaacagaaagctgttatcagagtgatccccttgaaaatggaccccacaggaaaactgaatctcactttggaaggtgtgtttgctggtgttgctgaaataactccagcagaaggaaaattaatgcagtcccacccactgtacctgtgcaatgccagtgatgacgacaatctggagcctggattcatcagcatcgtcaagctggagagtcctcgacgggccccccgcccctgcctgtcactggctagcaaggctcggatggcgggtgagcgaggagccagtgctgtcctctttgacatcactgaggatcgagctgctgctgagcagctgcagcagccgctggggctgacctggccagtggtgttgatctggggtaatgacgctgagaagctgatggagtttgtgtacaagaaccaaaaggcccatgtgaggattgagctgaaggagcccccggcctggccagattatgatgtgtggatcctaatgacagtggtgggcaccatctttgtgatcatcctggcttcggtgctgcgcatccggtgccgcccccgccacagcaggccggatccgcttcagcagagaacagcctgggccatcagccagctggccaccaggaggtaccaggccagctgcaggcaggcccggggtgagtggccagactcagggagcagctgcagctcagcccctgtgtgtgccatctgtctggaggagttctctgaggggcaggagctacgggtcatttcctgcctccatgagttccatcgtaactgtgtggacccctggttacatcagcatcggacttgccccctctgcgtgttcaacatcacagagggagattcattttcccagtccctgggaccctctcgatcttaccaagaaccaggtcgaagactccacctcattcgccagcatcccggccatgcccactaccacctccctgctgcctacctgttgggcccttcccggagtgcagtggctcggcccccacgacctggtcccttcctgccatcccaggagccaggcatgggccctcggcatcaccgcttccccagagctgcacatccccgggctccaggagagcagcagcgcctggcaggagcccagcacccctatgcacaaggctggggaatgagccacctccaatccacctcacagcaccctgctgcttgcccagtgcccctacgccgggccaggccccctgacagcagtggatctggagaaagctattgcacagaacgcagtgggtacctggcagatgggccagccagtgactccagctcagggccctgtcatggctcttccagtgactctgtggtcaactgcacggacatcagcctacagggggtccatggcagcagttctactttctgcagctccctaagcagtgactttgaccccctagtgtactgcagccctaaaggggatccccagcgagtggacatgcagcctagtgtgacctctcggcctcgttccttggactcggtggtgcccacaggggaaacccaggtttccagccatgtccactaccaccgccaccggcaccaccactacaaaaagcggttccagtggcatggcaggaagcctggcccagaaaccggagtcccccagtccaggcctcctattcctcggacacagccccagccagagccaccttctcctgatcagcaagtcaccggatccaactcagcagccccttcggggcggctctctaacccacagtgccccagggccctccctgagccagcccctggcccagttgacgcctccagcatctgccccagtaccagcagtctgttcaacttgcaaaaatccagcctctctgcccgacacccacagaggaaaaggcgggggggtccctccgagcccacccctggctctcggccccaggatgcaactgtgcacccagcttgccagatttttccccattacacccccagtgtggcatatccttggtccccagaggcacaccccttgatctgtggacctccaggcctggacaagaggctgctaccagaaaccccaggcccctgttactcaaattcacagccagtgtggttgtgcctgactcctcgccagcccctggaaccacatccacctggggaggggccttctgaatggagttctgacaccgcagagggcaggccatgcccttatccgcactgccaggtgctgtcggcccagcctggctcagaggaggaactcgaggagctgtgtgaacaggctgtgtgagatgttcaggcctagctccaaccaagagtgtgctccagatgtgtttgggccctacctggcacagagtcctgctcctgggaaaggaaaggaccacagcaaacaccattctttttgccgtacttcctagaagcactggaagaggactggtgatggtggagggtgagagggtgccgtttcctgctccagctccagaccttgtctgcagaaaacatctgcagtgcagcaaatccatgtccagccaggcaaccagctgctgcctgtggcgtgtgtgggctggatcccttgaaggctgagtttttgagggcagaaagctagctatgggtagccaggtgttacaaaggtgctgctccttctccaacccctacttggtttccctcaccccaagcctcatgttcataccagccagtgggttcagcagaacgcatgacaccttatcacctccctccttgggtgagctctgaacaccagctttggcccctccacagtaaggctgctacatcaggggcaaccctggctctatcattttccttttttgccaaaaggaccagtagcataggtgagccctgagcactaaaaggaggggtccctgaagctttcccactatagtgtggagttctgtccctgaggtgggtacagcagccttggttcctctgggggttgagaataagaatagtggggagggaaaaactcctccttgaagatttcctgtctcagagtcccagagaggtagaaaggaggaatttctgctggactttatctgggcagaggaaggatggaatgaaggtagaaaaggcagaattacagctgagcggggacaacaaagagttcttctctgggaaaagttttgtcttagagcaaggatggaaaatggggacaacaaaggaaaagcaaagtgtgacccttgggtttggacagcccagaggcccagctccccagtataagccatacaggccagggacccacaggagagtggattagagcacaagtctggcctcactgagtggacaagagctgatgggcctcatcagggtgacattcaccccagggcagcctgaccactcttggcccctcaggcattatcccatttggaatgtgaatgtggtggcaaagtgggcagaggaccccacctgggaacctttttccctcagttagtggggagactagcacctaggtacccacatgggtatttatatctgaaccagacagacgcttgaatcaggcactatgttaagaaatatatttatttgctaatatatttatccacaaaaaaaaaaaaaaaaaa

SEQ ID NO: 59 - protein, 783 aa, Homo Sapiens
MSGGHQLQLAALWPWLLMATLQAGFGRTGLVLAAAVESERSAEQKAVIRVIPLKMDPTGKLNLTLEGVFAGVAEITPAEGKLMQSHPLYLCNASDDDNLEPGFISIVKLESPRRAPRPCLSLASKARMAGERGASAVLFDITEDRAAAEQLQQPLGLTWPVVLIWGNDAEKLMEFVYKNQKAHVRIELKEPPAWPDYDVWILMTVVGTIFVIILASVLRIRCRPRHSRPDPLQQRTAWAISQLATRRYQASCRQARGEWPDSGSSCSSAPVCAICLEEFSEGQELRVISCLHEFHRNCVDPWLHQHRTCPLCVFNITEGDSFSQSLGPSRSYQEPGRRLHLIRQHPGHAHYHLPAAYLLGPSRSAVARPPRPGPFLPSQEPGMGPRHHRFPRAAHPRAPGEQQRLAGAQHPYAQGWGMSHLQSTSQHPAACPVPLRRARPPDSSGSGESYCTERSGYLADGPASDSSSGPCHGSSSDSVVNCTDISLQGVHGSSSTFCSSLSSDFDPLVYCSPKGDPQRVDMQPSVTSRPRSLDSVVPTGETQVSSHVHYHRHRHHHYKKRFQWHGRKPGPETGVPQSRPPIPRTQPQPEPPSPDQQVTGSNSAAPSGRLSNPQCPRALPEPAPGPVDASSICPSTSSLFNLQKSSLSARHPQRKRRGGPSEPTPGSRPQDATVHPACQIFPHYTPSVAYPWSPEAHPLICGPPGLDKRLLPETPGPCYSNSQPVWLCLTPRQPLEPHPPGEGPSEWSSDTAEGRPCPYPHCQVLSAQPGSEEELEELCEQAV

SEQ ID NO: 60 - DNA, 1760 bp, Homo Sapiens
  CDS (198)...(896)
gcagcaggccaagggggaggtgcgagcgtggacctgggacgggtctgggcggctctcggtggttggcacgggttcgcacacccattcaagcggcaggacgcacttgtcttagcagttctcgctgaccgcgctagctgcggcttctacgctccggcactctgagttcatcagcaaacgccctggcgtctgtcctcaccatgcctagcctttgggaccgcttctcgtcgtcgtccacctcctcttcgccctcgtccttgccccgaactcccaccccagatcggccgccgcgctcagcctgggggtcggcgacccgggaggaggggtttgaccgctccacgagcctggagagctcggactgcgagtccctggacagcagcaacagtggcttcgggccggaggaagacacggcttacctggatggggtgtcgttgcccgacttcgagctgctcagtgaccctgaggatgaacacttgtgtgccaacctgatgcagctgctgcaggagagcctggcccaggcgcggctgggctctcgacgccctgcgcgcctgctgatgcctagccagttggtaagccaggtgggcaaagaactactgcgcctggcctacagcgagccgtgcggcctgcggggggcgctgctggacgtctgcgtggagcagggcaagagctgccacagcgtgggccagctggcactcgaccccagcctggtgcccaccttccagctgaccctcgtgctgcgcctggactcacgactctggcccaagatccaggggctgtttagctccgccaactctcccttcctccctggcttcagccagtccctgacgctgagcactggcttccgagtcatcaagaagaagctgtacagctcggaacagctgctcattgaggagtgttgaacttcaacctgagggggccgacagtgccctccaagacagagacgactgaacttttggggtggagactagaggcaggagctgagggactgattccagtggttggaaaactgaggcagccacctaaggtggaggtgggggaatagtgtttcccaggaagctcattgagttgtgtgcgggtggctgtgcattggggacacatacccctcagtactgtagcatggaacaaaggcttaggggccaacaaggcttccagctggatgtgtgtgtagcatgtaccttattatttttgttactgacagttaacagtggtgtgacatccagagagcagctgggctgctcccgccccagcctggcccagggtgaaggaagaggcacgtgctcctcagagcagccggagggaggggggaggtcggaggtcgtggaggtggtttgtgtatcttactggtctgaagggaccaagtgtgtttgttgtttgttttgtatcttgtttttctgatcggagcatcactactgacctgttgtaggcagctatcttacagacgcatgaatgtaagagtaggaaggggtgggtgtcagggatcacttgggatctttgacacttgaaaaattacacctggcagctgcgtttaagccttcccccatcgtgtactgcagagttgagctggcaggggaggggctgagagggtgggggctggaacccctccccgggaggagtgccatctgggtcttccatctagaactgtttacatgaagataagatactcactgttcatgaatacacttgatgttcaagtattaagacctatgcaatattttttacttttctaataaacatgtttgttaaaacaaaaaaaaaaaaaaaaa

SEQ ID NO: 61 - protein, 232 aa, Homo Sapiens
MPSLWDRFSSSSTSSSPSSLPRTPTPDRPPRSAWGSATREEGFDRSTSLESSDCESLDSSNSGFGPEEDTAYLDGVSLPDFELLSDPEDEHLCANLMQLLQESLAQARLGSRRPARLLMPSQLVSQVGKELLRLAYSEPCGLRGALLDVCVEQGKSCHSVGQLALDPSLVPTFQLTLVLRLDSRLWPKIQGLFSSANSPFLPGFSQSLTLSTGFRVIKKKLYSSEQLLIEEC

SEQ ID NO: 62 - DNA, 2323 bp, Homo Sapiens
  CDS (61)...(1506)
agctatgatcgcaacaccttggtggccatcgtggtgggtgtggggcgcctcatcactggcatggaccgaggcctcatgggcatgtgtgtcaacgagcggcgacgcctcattgtgcctccccacctgggctatgggagcatcggcctggcggggctcattccaccggatgccaccctctacttcgatgtggttctgctggatgtgtggaacaaggaagacaccgtgcaggtgagcacattgctgcgcccgccccactgcccccgcatggtccaggacggcgactttgtccgctaccactacaatggcaccctgctggacggcacctccttcgacaccagctacagtaagggcggcacttatgacacctacgtcggctctggttggctgatcaagggcatggaccaggggctgctgggcatgtgtcctggagagagaaggaagattatcatccctccattcctggcctatggcgagaaaggctatgggacagtgatccccccacaggcctcgctggtctttcacgtcctcctgattgacgtgcacaacccgaaggacgctgtccagctagagacgctggagctcccccccggctgtgtccgcagagccggggccggggacttcatgcgctaccactacaatggctccttgatggacggcaccctcttcgattccagctactcccgcaaccacacctacaatacctatatcgggcagggttacatcatccccgggatggaccaggggctgcagggtgcctgcatgggggaacgccggagaattaccatccccccgcacctcgcctatggggagaatggaactggagacaagatccctggctctgccgtgctaatcttcaacgtccatgtcattgacttccacaaccctgcggatgtggtggaaatcaggacactgtcccggccatccgagacctgcaatgagaccaccaagcttggggactttgttcgataccattacaactgttctttgctggacggcacccagctgttcacctcgcatgactacggggccccccaggaggcgactctcggggccaacaaggtgatcgaaggcctggacacgggcctgcagggcatgtgtgtgggagagaggcggcagctcatcgtgcccccgcacctggcccacggggagagtggagcccggggagtcccaggcagtgctgtgctgctgtttgaggtggagctggtgtcccgggaggatgggctgcccacaggctacctgtttgtgtggcacaaggaccctcctgccaacctgtttgaagacatggacctcaacaaggatggcgaggtccctccggaggagttctccaccttcatcaaggctcaagtgagtgagggcaaaggacgcctcatgcctgggcaggaccctgagaaaaccataggagacatgttccagaaccaggaccgcaaccaggacggcaagatcacagtcgacgagctcaagctgaagtcagatgaggacgaggagcgggtccacgaggagctctgaggggcagggagcctggccaggcctgagacacagaggcccactgcgagggggacagtggcggtgggactgacctgctgacagtcaccctccctctgctgggatgaggtccaggagccaactaaaacaatggcagaggagacatctctggtgttcccaccaccctagatgaaaatccacagcacagacctctaccgtgtttctcttccatccctaaaccacttccttaaaatgtttggatttgcaaagccaatttggggcctgtggagcctggggttggatagggccatggctggtcccccaccatacctcccctccacatcactgacacagctgagcttgttatccatctccccaaactttctctttctttgtacttcttgtcatccccactcccagcccctattcctctatgtgacagctggctaggacccctctgccttccttcccaatcctgactggctcctagggaaggggaaggctcctggagggcagccctacctctcccatgccctttgccctcctccctcgcctccagtggaggctgagctgaccctgggctgctggaggccagactgggctgtagttagcttttcatccctaaagaaggctttccctaaggaaccatagaagagaggaagaaaacaaagggcatgtgtgagggaagctgcttgggtgggtgttagggctatgaaatcttggatttggggctgaggggtgggagggagggcagagctctgcacactcaaaggctaaactggtgtcagtccttttttcctttgttccaaataaaagattaaaccaaaaaaaaaaaaaaaaa

SEQ ID NO: 63 - protein, 481 aa, Homo Sapiens
MDRGLMGMCVNERRRLIVPPHLGYGSIGLAGLIPPDATLYFDVVLLDVWNKEDTVQVSTLLRPPHCPRMVQDGDFVRYHYNGTLLDGTSFDTSYSKGGTYDTYVGSGWLIKGMDQGLLGMCPGERRKIIIPPFLAYGEKGYGTVIPPQASLVFHVLLIDVHNPKDAVQLETLELPPGCVRRAGAGDFMRYHYNGSLMDGTLFDSSYSRNHTYNTYIGQGYIIPGMDQGLQGACMGERRRITIPPHLAYGENGTGDKIPGSAVLIFNVHVIDFHNPADVVEIRTLSRPSETCNETTKLGDFVRYHYNCSLLDGTQLFTSHDYGAPQEATLGANKVIEGLDTGLQGMCVGERRQLIVPPHLAHGESGARGVPGSAVLLFEVELVSREDGLPTGYLFVWHKDPPANLFEDMDLNKDGEVPPEEFSTFIKAQVSEGKGRLMPGQDPEKTIGDMFQNQDRNQDGKITVDELKLKSDEDEERVHEEL

SEQ ID NO: 64 - DNA, 2090 bp, Homo Sapiens
  CDS (403)...(1173)
agggtgagggagggggtgggatgggtggggggtaacgggggaaactggggaagtggggaaccgaggggcaaccaggggaagatggggtgctggaggagagcttgtgggagccaaggagcaccttggacatctggagtctggcagggtttgatcccagggcctgggcaacggaggtgtagctggcagcagcgggcaggtgaggaccccatctgccgggcaggtgagtcccttccctccccaggcctcgcttccccagccttctgaaagaaggaggtttaggggatcgagggctggcggggagaagcagacaccctcccagcagaggggcaggatgggggcaggagagttagcaaaggtgacatcttctcggggggagccgagactgcgcaaggctggggggctatgggcccgttccaggcagaaagagcaagagggcagggagggagcacaggggtggccagcgtagggtccagcacgtggggtggtaccccaggcctgggtcagacagggacaaggcaggggacacaggacggaggggtccccagctgccacctcacccaccgcaattcatttagtagcaggcacagaggcagctccggcacggctttctcaggcctatgccggagcctcgagggctggagagcgggaagacaggcagtgctcggggagttgcagcaggacatcaccaggagggcgaagcggccacgggaggggggccccgggacattgcgcagcaaggaggctgcaggggctcggcctgcgggcgccggtcccacgaggcactgcggcccagggtctggtgcggagagggcccacagtggacttggtgacgctgtatgccctcaccgctcagcccctggggctggcttggcagacagtacagcatccaggggagtcaagggcatggggcgagaccagactaggcgaggcgggcggggcggagtgaatgagctctcaggagggaggatggtgcaggcaggggtgaggagcgcagcgggcggcgagcgggaggcactggcctccagagcccgtggccaaggcgggcctcgcgggcggcgacggagccgggatcggtgcctcagcgttcgggctggagacgaggccaggtctccagctggggtggacgtgcccaccagctgccgaaggccaagacgccaggtccggtggacgtgacaagcaggacatgacatggtccggtgtgacggcgaggacagaggaggcgcgtccggccttcctgaacaccttaggctggtggggctgcggcaagaagcgggtctgtttctttacttcctccacggagtcggcgcactatggctgccctctgggctcccagaacccacaacatgaaagaaatggtgctacccagctcaagcctgggcctttgaatccggacacaaaaccctctagcttggaaatgaatatgctgcactttacaaccactgcactacctgactcaggaatcggctctcgaaggtgaagcgagaggaaccagacctcatcagcccaacatcaaagacaccatcggaacagcagcgcccgcagcacccaccccgcaccggcgactccatcttcacggccaccccctgcggcggacggttgaccaccagccaccacatcatcccagagctgagctcctccagcgggatgacgccgtccccaccacctccctcttcttctttttcatccttctgtctctttgtttctgagctttcctgtctttccttttttctgagagattcaaagcctccacgactctgtttcccccgtcccttctgaatttaatttgcactaagtcatttgcactggttggagttgtggagacggccttgagtctcggtgcgagtgtgcgtgagtgtgagccaccttggcaagtgcctgcgcagggcccggccgccctccatctgggccgggtgactgggcgccggctgtgtgcccgaggcctcaccctgccctcgcctagtctggaagctccgaccgacatcacggagcagccttcaagcattccattacgccccatctcgctctgtgcccctccccaccagggcttcagcaggagccctggactcatcaccaataaacactgttacagc

SEQ ID NO: 65 - protein, 256 aa, Homo Sapiens [sequence omitted]

SEQ ID NO: 66 - DNA, 2516 bp, Homo Sapiens
  CDS (100)...(2265)
gcgagcgcagggcccagcccgggagccgctggagcagggcctgcgatggagcctgcagccccgggtcgcgtccctccctgagcgcccccgtcggcggccatgctgccccgagggcgcccccgggcgctgggggccgccgcgctgttgctgctgctgctgctgctcggattcctcctgttcggtggggacctggggtgtgagcgccgcgagcctggcgggcgagcgggggccccgggatgcttccccggcccgctcatgccacgtgtccccccagacgggaggctgcggagagccgccgccctcgacggagacccgggggccggccccggggaccacaaccgctccgactgcggcccgcagccgccgccgccgcccaagtgcgagctcttgcatgtggccatcgtgtgtgcggggcataactccagccgagacgtcatcaccctggtgaagtccatgctcttctacaggaaaaatccactgcacctccacttggtgactgacgccgtggccagaaacatcctggagacgctcttccacacatggatggtgcctgctgtccgtgtcagcttttatcatgccgaccagctcaagccccaggtctcctggatccccaacaagcactactccggcctctatgggctaatgaagctggtgctgcccagtgccttgcctgctgagctggcccgcgtcattgtcctggacacggatgtcaccttcgcctctgacatctcggagctctgggccctctttgctcacttttctgacacgcaggcgatcggtcttgtggagaaccagagtgactggtacctgggcaacctctggaagaaccacaggccctggcctgccttgggccggggatttaacacaggtgtgatcctgctgcggctggaccggctccggcaggctggctgggagcagatgtggaggctgacagccaggcgggagctccttagcctgcctgccacctcactggctgaccaggacatcttcaacgctgtgatcaaggagcacccggggctagtgcagcgtctgccttgtgtctggaatgtgcagctgtcagatcacacactggccgagcgctgctactctgaggcgtctgacctcaaggtgatccactggaactcaccaaagaagcttcgggtgaagaacaagcatgtggaattcttccgcaatttctacctgaccttcctggagtacgatgggaacctgctgcggagagagctctttgtgtgccccagccagcccccacctggtgctgagcagttgcagcaggccctggcacaactggacgaggaagacccctgctttgagttccggcagcagcagctcactgtgcaccgtgtgcatgtcactttcctgccccatgaaccgccacccccccggcctcacgatgtcacccttgtggcccagctgtccatggaccggctgcagatgttggaagccctgtgcaggcactggcctggccccatgagcctggccttgtacctgacagacgcagaagctcagcagttcctgcatttcgtcgaggcctcaccagtgcttgctgcccggcaggacgtggcctaccatgtggtgtaccgtgaggggcccctataccccgtcaaccagcttcgcaacgtggccttggcccaggccctcacgccttacgtcttcctcagtgacattgacttcctgcctgcctattctctctacgactacctcagggcctccattgagcagctggggctgggcagccggcgcaaggcagcactggtggtgccggcattcgagaccctgcgctaccgcttcagcttcccccattccaaggtggagctgttggccttgctggatgcgggcactctctacaccttcaggtaccacgagtggccccgaggccacgcacccacagactatgcccgctggcgggaggctcaggccccgtaccgtgtgcaatgggcggccaactatgaaccctacgtggtggtgccacgagactgtccccgctatgatcctcgctttgtgggcttcggctggaacaaagtggcccacattgtggagctggatgcccaggaatatgagctcctggtgctgcccgaggccttcaccatccatctgccccacgctccaagcctggacatctcccgcttccgctccagccccacctatcgtgactgcctccaggccctcaaggacgaattccaccaggacttgtcccgccaccatggggctgctgccctcaaatacctcccagccctgcagcagccccagagccctgcccgaggctgaggctgggccggcgctgcccctcatcttagcattgggcagacaccagggcaacctgccctccgccatccctgctatttaaattatttaaggtctctgggaagggctggggcagagcatctgtggggtggggtcttccccttgctgctattgtatggctggggactggtctctctctgccccagccagtttggggctggttcccccatcttgaattgtttatccctttttcataattaaagttttaaaacatc

SEQ ID NO: 67 - protein, 721 aa, Homo Sapiens
MLPRGRPRALGAAALLLLLLLLGFLLFGGDLGCERREPGGRAGAPGCFPGPLMPRVPPDGRLRRAAALDGDPGAGPGDHNRSDCGPQPPPPPKCELLHVAIVCAGHNSSRDVITLVKSMLFYRKNPLHLHLVTDAVARNILETLFHTWMVPAVRVSFYHADQLKPQVSWIPNKHYSGLYGLMKLVLPSALPAELARVIVLDTDVTFASDISELWALFAHFSDTQAIGLVENQSDWYLGNLWKNHRPWPALGRGFNTGVILLRLDRLRQAGWEQMWRLTARRELLSLPATSLADQDIFNAVIKEHPGLVQRLPCVWNVQLSDHTLAERCYSEASDLKVIHWNSPKKLRVKNKHVEFFRNFYLTFLEYDGNLLRRELFVCPSQPPPGAEQLQQALAQLDEEDPCFEFRQQQLTVHRVHVTFLPHEPPPPRPHDVTLVAQLSMDRLQMLEALCRHWPGPMSLALYLTDAEAQQFLHFVEASPVLAARQDVAYHVVYREGPLYPVNQLRNVALAQALTPYVFLSDIDFLPAYSLYDYLRASIEQLGLGSRRKAALVVPAFETLRYRFSFPHSKVELLALLDAGTLYTFRYHEWPRGHAPTDYARWREAQAPYRVQWAANYEPYVVVPRDCPRYDPRFVGFGWNKVAHIVELDAQEYELLVLPEAFTIHLPHAPSLDISRFRSSPTYRDCLQALKDEFHQDLSRHHGAAALKYLPALQQPQSPARG

SEQ ID NO: 68 - DNA, 1280 bp, Homo Sapiens
  CDS (60)...(1016)
tgccgcagcccccgcccgcccgcagagcttttgaaaggcggcgggaggcggcgagcgccatggccagtccgggctgcctgctgtgcgtgctgggcctgctactctgcggggcggcgagcctcgagctgtctagaccccacggcgacaccgccaagaagcccatcatcggaatattaatgcaaaaatgccgtaataaagtcatgaaaaactatggaagatactatattgctgcgtcctatgtaaagtacttggagtctgcaggtgcgagagttgtaccagtaaggctggatcttacagagaaagactatgaaatacttttcaaatctattaatggaatccttttccctggaggaagtgttgacctcagacgctcagattatgctaaagtggccaaaatattttataacttgtccatacagagttttgatgatggagactattttcctgtgtggggcacatgccttggatttgaagagctttcactgctgattagtggagagtgcttattaactgccacagatactgttgacgtggcaatgccgctgaacttcactggaggtcaattgcacagcagaatgttccagaattttcctactgagttgttgctgtcattagcagtagaacctctgactgccaatttccataagtggagcctctccgtgaagaattttacaatgaatgaaaagttaaagaagtttttcaatgtcttaactacaaatacagatggcaagattgagtttatttcaacaatggaaggatataagtatccagtatatggtgtccagtggcatccagagaaagcaccttatgagtggaagaatttggatggcatttcccatgcacctaatgctgtgaaaaccgcattttatttagcagagttttttgttaatgaagctcggaaaaacaaccatcattttaaatctgaatctgaagaggagaaagcattgatttatcagttcagtccaatttatactggaaatatttcttcatttcagcaatgttacatatttgattgaaagtcttcaatttgttaacagagcaaatttgaataattccatgattaaactgttagaataacttgctactcatggcaagattaggaagtcacagattcttttctataatgtgcctggctctgattcttcattatgtatgtgactatttatataacattagataattaaatagtgagacataaatagagtgctttttcatggaaaagccttcttatatctgaagattgaaaaataaatttactgaaatacaaaaaaaaaaaaaaa

SEQ ID NO: 69 - protein, 318 aa, Homo Sapiens
MASPGCLLCVLGLLLCGAASLELSRPHGDTAKKPIIGILMQKCRNKVMKNYGRYYIAASYVKYLESAGARVVPVRLDLTEKDYEILFKSINGILFPGGSVDLRRSDYAKVAKIFYNLSIQSFDDGDYFPVWGTCLGFEELSLLISGECLLTATDTVDVAMPLNFTGGQLHSRMFQNFPTELLLSLAVEPLTANFHKWSLSVKNFTMNEKLKKFFNVLTTNTDGKIEFISTMEGYKYPVYGVQWHPEKAPYEWKNLDGISHAPNAVKTAFYLAEFFVNEARKNNHHFKSESEEEKALIYQFSPIYTGNISSFQQCYIFD

SEQ ID NO: 70 - DNA, 1064 bp, Homo Sapiens
  CDS (78)...(398)
  misc_feature (1)...(1064): n = A,T,C or G
cacagccgggtcgcaggcacctccccngccagctctcccgcattctgcacagcttcccgacgcgtctgctgagccccatggcccacgccacgctctccgccgcccccagcaatccccggctcctgcgggtggcgctgctgctcctgctcctggtgggcagccggcgcgcagcaggagcgtccgtggtcactgaactgcgctgccagtgcttgcagacactgcagggaattcacctcaagaacatccaaagtgtgaatgtaaggtcccccggaccccactgcgcccaaaccgaagtcatagccacactcaagaatgggaagaaagcttgtctcaaccccgcatcccccatggttcagaaaatcatcgaaaagatactgaacaaggggagcaccaactgacaggagagaagtaagaagcttatcagcgtatcattgacacttcctgcagggtggtccctgcccttaccagagctgaaaatgaaaaagagaacagcagctttctagggacagctggaaagggacttaatgtgtttgactatttcttacgagggttctacttatttatgtatttatttttgaaagcttgtattttaatattttacatgctgttatttaaagatgtgagtgtgtttcatcaaacatagctcagtcctgattatttaattggaatatgatgggttttaaatgtgtcattaaactaatatttagtgggagaccataatgtgtcagccaccttgataaatgacagggtggggaactggagggtngggggattgaaatgcaagcaattagtggatcactgttagggtaagggaatgtatgtacacatctattttttatacttttttttttaaaaaagaatgtcagttgttatttattcaaattatctcacattatgtgttcaacatttttatgctgaagtttcccttagacattttatgtcttgcttgtagggcataatgccttgtttaatgtccattctgcagcgtttctctttcccttggaaaagagaatttatcattactgttacatttgtacaaatgacatgataataaaagttttatg

SEQ ID NO: 71 - protein, 106 aa, Homo Sapiens
MAHATLSAAPSNPRLLRVALLLLLLVGSRRAAGASVVTELRCQCLQTLQGIHLKNIQSVNVRSPGPHCAQTEVIATLKNGKKACLNPASPMVQKIIEKILNKGSTN

SEQ ID NO: 72 - DNA, 737 bp, Homo Sapiens
  CDS (30)...(662)
ggagtttcgccgccgcagtcttcgccaccatgccgccctacaccgtggtctatttcccagttcgaggccgctgcgcggccctgcgcatgctgctggcagatcagggccagagctggaaggaggaggtggtgaccgtggagacgtggcaggagggctcactcaaagcctcctgcctatacgggcagctccccaagttccaggacggagacctcaccctgtaccagtccaataccatcctgcgtcacctgggccgcacccttgggctctatgggaaggaccagcaggaggcagccctggtggacatggtgaatgacggcgtggaggacctccgctgcaaatacatctccctcatctacaccaactatgaggcgggcaaggatgactatgtgaaggcactgcccgggcaactgaagccttttgagaccctgctgtcccagaaccagggaggcaagaccttcattgtgggagaccagatctccttcgctgactacaacctgctggacttgctgctgatccatgaggtcctagcccctggctgcctggatgcgttccccctgctctcagcatatgtggggcgcctcagcgcccggcccaagctcaaggccttcctggcctcccctgagtacgtgaacctccccatcaatggcaacgggaaacagtgagggttggggggactctgagcgggaggcagagtttgccttcctttctccaggaccaataaaatttctaagagagct

SEQ ID NO: 73 - protein, 210 aa, Homo Sapiens
MPPYTVVYFPVRGRCAALRMLLADQGQSWKEEVVTVETWQEGSLKASCLYGQLPKFQDGDLTLYQSNTILRHLGRTLGLYGKDQQEAALVDMVNDGVEDLRCKYISLIYTNYEAGKDDYVKALPGQLKPFETLLSQNQGGKTFIVGDQISFADYNLLDLLLIHEVLAPGCLDAFPLLSAYVGRLSARPKLKAFLASPEYVNLPINGNGKQ

SEQ ID NO: 74 - DNA, 1619 bp, Homo Sapiens
  CDS (61)...(1329)
agttctgcggtgccagggagtggagcagagctcagccccgtcccaaacacagatgggaccatgaactccggacacagcttcagccagaccccctcggcctccttccatggcgccggaggtggctggggccggcccaggagcttccccagggctcccaccgtccatggcggtgcggggggagcccgcatctccctgtccttcaccacgcggagctgcccaccccctggagggtcttggggttctggaagaagcagccccctactaggcggaaatgggaaggccaccatgcagaatctcaacgaccgcctggcctcctacctggagaaggttcgcgccctggaggaggccaacatgaagctggaaagccgcatcctgaaatggcaccagcagagagatcctggcagtaagaaagattattcccagtatgaggaaaacatcacacacctgcaggagcagatagtggatggtaagatgaccaatgctcagattattcttctcattgacaatgccaggatggcagtggatgacttcaacctcaagtatgaaaatgaacactcctttaagaaagacttggaaattgaagtcgagggcctccgaaggaccttagacaacctgaccattgtcacaacagacctagaacaggaggtggaaggaatgaggaaagagctcattctcatgaaggagcaccatgagcaggaaatggaggagcatcatgtgccaagtgacttcaatgtcaatgtgaaggtggatacaggtcccagggaagatctgattaaggtcctggaggatatgagacaagaatatgagcttataataaagaagaagcatcgagacttggacacttggtataaagaacagtctgcagccatgtcccaggaggcagccagtccagccactgtgcagagcagacaaggtgacatccacgaactgaagcgcacattccaggccctggagattgacctgcaggcacagtacagcacgaaatctgctttggaaaacatgttatccgagacccagtctcggtactcctgcaagctccaggacatgcaagagatcatctcccactatgaggaggaactgacgcagctacgccacgaactggagcggcagaacaatgaataccaagtgctgctgggcatcaaaacccacctggagaaggaaatcaccacgtaccgacggctcctggagggagagagtgaagggacacgggaagaatcaaagtcgagcatgaaagtgtctgcaactccaaagatcaaggccataacccaggagaccatcaacggaagattagttctttgtcaagtgaatgaaatccaaaagcacgcatgagaccaatgaaagtttccgcctgttgtaaagtctattttcccccaaggaaagtccttgcacagacaccagtgagtgagttctaaaagatacccttggaattatcagactcagaaacttttatttttttttttctgtaacagtctcaccagacttctcataatgctcttaatatattgcacttttctaatcaaagtgcgagtttatgagggtaaagctctactttcctactgcagccttcagattctcatcattttgcatctattttgtagccaataaaactccgcactagc

SEQ ID NO: 75 - protein, 422 aa, Homo Sapiens
MNSGHSFSQTPSASFHGAGGGWGRPRSFPRAPTVHGGAGGARISLSFTTRSCPPPGGSWGSGRSSPLLGGNGKATMQNLNDRLASYLEKVRALEEANMKLESRILKWHQQRDPGSKKDYSQYEENITHLQEQIVDGKMTNAQIILLIDNARMAVDDFNLKYENEHSFKKDLEIEVEGLRRTLDNLTIVTTDLEQEVEGMRKELILMKEHHEQEMEEHHVPSDFNVNVKVDTGPREDLIKVLEDMRQEYELIIKKKHRDLDTWYKEQSAAMSQEAASPATVQSRQGDIHELKRTFQALEIDLQAQYSTKSALENMLSETQSRYSCKLQDMQEIISHYEEELTQLRHELERQNNEYQVLLGIKTHLEKEITTYRRLLEGESEGTREESKSSMKVSATPKIKAITQETINGRLVLCQVNEIQKHA

SEQ ID NO: 76 - DNA, 1257 bp, Homo Sapiens
  CDS (27)...(863)
gaggcgcgcgggtgaaaggcgcattgatgcagcctgcggcggcctcggagcgcggcggagcagacgctgaccacgttcctctcctcggtctcctccgcctccagctccgcgctgcccggcagccgggagccatgcgaccccagggccccgccgcctccccgcagcggctccgcggcctcctgctgctcctgctgctgcagctgcccgcgccgtcgagcgcctctgagatccccaaggggaagcaaaaggcgcagctccggcagagggaggtggtggacctgtataatggaatgtgcttacaagggccagcaggagtgcctggtcgagacgggagccctggggccaatggcattccgggtacacctgggatcccaggtcgggatggattcaaaggagaaaagggggaatgtctgagggaaagctttgaggagtcctggacacccaactacaagcagtgttcatggagttcattgaattatggcatagatcttgggaaaattgcggagtgtacatttacaaagatgcgttcaaatagtgctctaagagttttgttcagtggctcacttcggctaaaatgcagaaatgcatgctgtcagcgttggtatttcacattcaatggagctgaatgttcaggacctcttcccattgaagctataatttatttggaccaaggaagccctgaaatgaattcaacaattaatattcatcgcacttcttctgtggaaggactttgtgaaggaattggtgctggattagtggatgttgctatctgggttggcacttgttcagattacccaaaaggagatgcttctactggatggaattcagtttctcgcatcattattgaagaactaccaaaataaatgctttaattttcatttgctacctctttttttattatgccttggaatggttcacttaaatgacattttaaataagtttatgtatacatctgaatgaaaagcaaagctaaatatgtttacagaccaaagtgtgatttcacactgtttttaaatctagcattattcattttgcttcaatcaaaagtggtttcaatattttttttagttggttagaatactttcttcatagtcacattctctcaacctataatttggaatattgttgtggtcttttgttttttctcttagtatagcatttttaaaaaaatataaaagctaccaatctttgtacaatttgtaaatgttaagaattttttttatatctgttaaataaaaattatttccaacaacctta

SEQ ID NO: 77 - protein, 278 aa, Homo Sapiens
MQPAAASERGGADADHVPLLGLLRLQLRAARQPGAMRPQGPAASPQRLRGLLLLLLLQLPAPSSASEIPKGKQKAQLRQREVVDLYNGMCLQGPAGVPGRDGSPGANGIPGTPGIPGRDGFKGEKGECLRESFEESWTPNYKQCSWSSLNYGIDLGKIAECTFTKMRSNSALRVLFSGSLRLKCRNACCQRWYFTFNGAECSGPLPIEAIIYLDQGSPEMNSTINIHRTSSVEGLCEGIGAGLVDVAIWVGTCSDYPKGDASTGWNSVSRIIIEELPK

SEQ ID NO: 78 - DNA, 2551 bp, Homo Sapiens
  CDS (222)...(1580)
gtcgacccacgcgtccggggagctggtccctgcgctccctgcgccctggggatgcccctgccgccctgacgcccgccagcctgagccaccggcgcatgtgaccgcgcgtccgccccagtcccatccgtaggcgcccggcgcccggccccgcagcggcctcgttgtccccgccggcccccgcccggtctcccgcgctgccacccgccgccggccctgccgccatgcaggcgcgagcgctgctcctggccgcgttggccgcgctggcgctggcccgggagccccctgcggcgccgtgtcccgcgcgctgcgacgtgtcgcggtgtcccagcccccgctgccccggcggctacgtgcccgacctctgcaactgctgcctggtgtgcgccgccagcgagggcgagccctgtggcggccctctggactcgccttgcggcgagagcctggagtgcgtgcgcggcctatgccgctgccgctggtcgcacgccgtgtgtggcaccgacgggcacacctatgccaacgtgtgcgcgctgcaggcggccagccgccgcgcgctgcagctctccgggacgcccgtgcgccagctgcagaagggcgcctgcccgttgggtctccaccagctgagcagcccgcgctacaagttcaacttcattgctgacgtggtggagaagatcgcaccagccgtggtccacatagagctcttcctgagacacccgctgtttggccgcaacgtgcccctgtccagcggttctggcttcatcatgtcagaggccggcctgatcatcaccaatgcccacgtggtgtccagcaacagtgctgccccgggcaggcagcagctcaaggtgcagctacagaatggggactcctatgaggccaccatcaaagacatcgacaagaagtcggacattgccaccatcaagatccatcccaagaaaaagctccctgtgttgttgctgggtcactcggccgacctgcgcgtggggagtttgtggtggccatcggagtcccttcgccctacagaacacagtgacaacggcatcgtagcactgcccagcggagggcagggagctgggcctccgggactccgacatggactacataccagacggatgccatcatccaactacgggaactccgggggaccactggtgaacctggatggcgaggtcattggcatcaacacgctcaaggtcacggctggcatctcctttgccatcccctcagaccgcatcacacggttcctcacagagttccaagacaagcagatcaaagactgtaagaagcgcttcatcggcatacggatgcggacgatcacaccaagcctggtggatgagctgaaggccagcaacccggacttcccagaggtcagcagtggaatttatgtgcaagaggttgcgccgaattcaccttctcagagaggcggcatccaagatggtgacatcatcgtcaaggtcaacgggcgtcctctagtggactcgagtgagctgcaggaggccgtgctgaccgagtctcctctcctactggaggtgcggcgggggaacgacgacctcctcttcagcatcgcacctgaggtggtcatgtgaggggcgcattcctccagcgccaagcgtcagagcctgcagacaacggagggcagcgcccgccgagatcaggacgaaggaccaccgtcggtcctcagcagggcgtcactcctcctggctgtccggggcagagggaggtgggcttggcaggggccgaatttccgcctggggagtgttggatccacatcccggtgccggggagggaagcccaacatccccttgtacagatgatcctgaaagtcacttccaagttctccggatattcacaaaactgccttccatggaggtcccctcctctcctagcttcccgcctctgcccctgtgaacacccatctgcagtatcccctgctcctgcccctcctactgcaggtctgggctgccaagcttcttcccccctgacaaacgcccacctgacctgaggccccagcttccctctgccctaggacttaccaagctgtagggccagggctgctgcctgccagcctggggtccctggaggacaggtcacatctgatccctttggggtgcggcgggtggggtccagcccagagcaggcactgagtgaatgccccctggctgcgagctgagccccgccctgccatgaggttttcctccccaggcaggcaggaggccgcggggagcacgtggaaagttggctgctgcctggggaagcttctcctccccaaggcggccatggggcagcctgcagaggacagtggacgtggagctgcggggtgtgaggactgagccggcttccccttcccacgcagctctgggatgcagcagccgctcgcatggaagtgccgcccagaggcatgcaggctgctgggcaccaccccctcatccagggaacgagtgtgtctcaaggggcatttgtgagctttgctgtaaatggattcccagtgttgcttgtactgtatgtttctctactgtatggaaaataaagtttacaagcacacggttctcagccaaaa

SEQ ID NO: 79 - protein, 452 aa, Homo Sapiens
MQARALLLAALAALALAREPPAAPCPARCDVSRCPSPRCPGGYVPDLCNCCLVCAASEGEPCGGPLDSPCGESLECVRGLCRCRWSHAVCGTDGHTYANVCALQAASRRALQLSGTPVRQLQKGACPLGLHQLSSPRYKFNFIADVVEKIAPAVVHIELFLRHPLFGRNVPLSSGSGFIMSEAGLIITNAHVVSSNSAAPGRQQLKVQLQNGDSYEATIKDIDKKSDIATIKIHPKKKLPVLLLGHSADLRVGSLWWPSESLRPTEHSDNGIVALPSGGQGAGPPGLRHGLHTRRMPSSNYGNSGGPLVNLDGEVIGINTLKVTAGISFAIPSDRITRFLTEFQDKQIKDCKKRFIGIRMRTITPSLVDELKASNPDFPEVSSGIYVQEVAPNSPSQRGGIQDGDIIVKVNGRPLVDSSELQEAVLTESPLLLEVRRGNDDLLFSIAPEVVM

SEQ ID NO: 80 - DNA, 647 bp, Homo Sapiens
  CDS (111)...(488)
gctcactgagcaccgtcccagcatccggacaccacagcggcccttcgctccacgcagaaaaccacacttctcataccttcactcaacacttccttccccaaagccagaagatgcacaaggaggaacatgaggtggctgtgctgggggcaccccccagcaccatccttccaaggtccaccgtgattaacatccacagcgagacctccgtgcccgaccatgtcgtctggtccctgttcaacaccctcttcttgaactggtgctgtctgggcttcatagcattcgcctactccgtaaagtctagggacaggaagatggttggcgacgtgaccggggcccaggcctatgcctccaccgccaagtgcctgaacatctgggccctgattctgggcatcctcatgaccattggattcatcctgttactggtattcggctctgtaacagtctaccatattatgttacagataatacaggaaaaacggggttactagtagccgcccatagcctgcaacctttgcactccactgtgcaatgctggccctgcacgctggggctgttgcccctgcccccttggtcctgcccctagatacagcagtttatacccacacacctgtctacagtgtcattcaataaagtgcacgtgcttgtga

SEQ ID NO: 81 - protein, 125 aa, Homo Sapiens
MHKEEHEVAVLGAPPSTILPRSTVINIHSETSVPDHVVWSLFNTLFLNWCCLGFIAFAYSVKSRDRKMVGDVTGAQAYASTAKCLNIWALILGILMTIGFILLLVFGSVTVYHIMLQIIQEKRGY

SEQ ID NO: 82 - DNA, 905 bp, Homo Sapiens
  CDS (280)...(678)
caacacaggggcagtctccaggacctccacaccattaacaagatgagccttgtgctcccttgggctctagagaggaagcccctctgagccctcagcccctctttcctccctctcctaaagtaatttgatcctcaggaatttgttctgccctcatctggccctggccagctctgcatttgacaaatgccaggaagaggaaactgttgagaaaacggaactactggggaaagggagggctcactgagaaccatcccggtaacccgaccgccgctggtcaccatgaaccacattgtgcaaaccttctctcctgtcaacagcggccagcctcccaactacgagatgctcaaggaggagcaggaagtggctatgctgggggggccccacaaccctgctcccccgacgtccaccgtgatccacatccgcagcgagacctccgtgcctgaccatgtcgtctggtccctgttcaacaccctcttcatgaacacctgctgcctgggcttcatagcattcgcctactccgtgaagtctagggacaggaagatggttggcgacgtgaccggggcccaggcctatgcctccaccgccaagtgcctgaacatctgggccctgattttgggcatcttcatgaccattctgctcgtcatcatcccagtgttggtcgtccaggcccagcgatagatcaggaggcatcattgaggccaggagctctgcccgtgacctgtatcccacgtactctatcttccattcctcgccctgcccccagaggccaggagctctgcccttgacctgtattccacttactccaccttccattcctcgccctgtccccacagccgagtcctgcatcagccctttatcctcacacgcttttctacaatggcattcaataaagtgtatatgtttct

SEQ ID NO: 83 - protein, 132 aa, Homo Sapiens
MNHIVQTFSPVNSGQPPNYEMLKEEQEVAMLGGPHNPAPPTSTVIHIRSETSVPDHVVWSLFNTLFMNTCCLGFIAFAYSVKSRDRKMVGDVTGAQAYASTAKCLNIWALILGIFMTILLVIIPVLVVQAQR

SEQ ID NO: 84 - DNA, 1124 bp, Homo Sapiens
  CDS (23)...(871)
gccgctgccaccgcaccccgccatggagcggccgtcgctgcgcgccctgctcctcggcgccgctgggctgctgctcctgctcctgcccctctcctcttcctcctcttcggacacctgcggcccctgcgagccggcctcctgcccgcccctgcccccgctgggctgcctgctgggcgagacccgcgacgcgtgcggctgctgccctatgtgcgcccgcggcgagggcgagccgtgcgggggtggcggcgccggcagggggtactgcgcgccgggcatggagtgcgtgaagagccgcaagaggcggaagggtaaagccggggcagcagccggcggtccgggtgtaagcggcgtgtgcgtgtgcaagagccgctacccggtgtgcggcagcgacggcaccacctacccgagcggctgccagctgcgcgccgccagccagagggccgagagccgcggggagaaggccatcacccaggtcagcaagggcacctgcgagcaaggtccttccatagtgacgccccccaaggacatctggaatgtcactggtgcccaggtgtacttgagctgtgaggtcatcggaatcccgacacctgtcctcatctggaacaaggtaaaaaggggtcactatggagttcaaaggacagaactcctgcctggtgaccgggacaacctggccattcagacccggggtggcccagaaaagcatgaagtaactggctgggtgctggtatctcctctaagtaaggaagatgctggagaatatgagtgccatgcatccaattcccaaggacaggcttcagcatcagcaaaaattacagtggttgatgccttacatgaaataccagtgaaaaaaggtgaaggtgccgagctataaacctccagaatattattagtctgcatggttaaaagtagtcatggataactacattacctgttcttgcctaataagtttcttttaatccaatccactaacactttagttatattcactggttttacacagagaaatacaaaataaagatcacacatcaagactatctacaaaaatttattatatatttacagaagaaaagcatgcatatcattaaacaaataaaatactttttatcacaaaaaaaaaaaaaaaa

SEQ ID NO: 85 - protein, 282 aa, Homo Sapiens
MERPSLRALLLGAAGLLLLLLPLSSSSSSDTCGPCEPASCPPLPPLGCLLGETRDACGCCPMCARGEGEPCGGGGAGRGYCAPGMECVKSRKRRKGKAGAAAGGPGVSGVCVCKSRYPVCGSDGTTYPSGCQLRAASQRAESRGEKAITQVSKGTCEQGPSIVTPPKDIWNVTGAQVYLSCEVIGIPTPVLIWNKVKRGHYGVQRTELLPGDRDNLAIQTRGGPEKHEVTGWVLVSPLSKEDAGEYECHASNSQGQASASAKITVVDALHEIPVKKGEGAEL

SEQ ID NO: 86 - DNA, 1639 bp, Homo Sapiens
  CDS (75)...(374)
agcagagcacacaagcttctaggacaagagccaggaagaaaccaccggaaggaaccatctcactgtgtgtaaacatgacttccaagctggccgtggctctcttggcagccttcctgatttctgcagctctgtgtgaaggtgcagttttgccaaggagtgctaaagaacttagatgtcagtgcataaagacatactccaaacctttccaccccaaatttatcaaagaactgagagtgattgagagtggaccacactgcgccaacacagaaattattgtaaagctttctgatggaagagagctctgtctggaccccaaggaaaactgggtgcagagggttgtggagaagtttttgaagagggctgagaattcataaaaaaattcattctctgtggtatccaagaatcagtgaagatgccagtgaaacttcaagcaaatctacttcaacacttcatgtattgtgtgggtctgttgtagggttgccagatgcaatacaagattcctggttaaatttgaatttcagtaaacaatgaatagtttttcattgtaccatgaaatatccagaacatacttatatgtaaagtattatttatttgaatctacaaaaaacaacaaataatttttaaatataaggattttcctagatattgcacgggagaatatacaaatagcaaaattgagccaagggccaagagaatatccgaactttaatttcaggaattgaatgggtttgctagaatgtgatatttgaagcatcacataaaaatgatgggacaataaattttgccataaagtcaaatttagctggaaatcctggatttttttctgttaaatctggcaaccctagtctgctagccaggatccacaagtccttgttccactgtgccttggtttctcctttatttctaagtggaaaaagtattagccaccatcttacctcacagtgatgttgtgaggacatgtggaagcactttaagttttttcatcataacataaattattttcaagtgtaacttattaacctatttattatttatgtatttatttaagcatcaaatatttgtgcaagaatttggaaaaatagaagatgaatcattgattgaatagttataaagatgttatagtaaatttattttattttagatattaaatgatgttttattagataaatttcaatcagggtttttagattaaacaaagaaacaattgggtacccagttaaattttcatttcagataaacaacaaataattttttagtataagtacattattgtttatctgaaagttttaattgaactaacaatcctagtttgatactcccagtcttgtcattgccagctgtgttggtagtgctgtgttgaattacggaataatgagttagaactattaaaacagccaaaactccacagtcaatattagtaatttcttgctggttgaaacttgtttattatgtacaaatagattcttataatattatttaaatgactgcatttttaaatacaaggctttatatttttaactttaagatgtttttatgtgctctccaaattttttttactgtttctgattgtatggaaatataaaagtaaatatgaaacatttaaaatataatttgttgtcaaagtaaaaaaaaaaaaaaa

SEQ ID NO: 87 - protein, 99 aa, Homo Sapiens
MTSKLAVALLAAFLISAALCEGAVLPRSAKELRCQCIKTYSKPFHPKFIKELRVIESGPHCANTEIIVKLSDGRELCLDPKENWVQRVVEKFLKRAENS

SEQ ID NO: 88 - DNA, 1840 bp, Homo Sapiens
  CDS (86)...(1366)
tccacacacacaaaaaacctgcgcgtgaggggggaggaaaagcagggcctttaaaaaggcaatcacaacaacttttgctgccaggatgcccttgctttggctgagaggatttctgttggcaagttgctggattatagtgaggagttcccccaccccaggatccgaggggcacagcgcggcccccgactgtccgtcctgtgcgctggccgccctcccaaaggatgtacccaactctcagccagagatggtggaggccgtcaagaagcacattttaaacatgctgcacttgaagaagagacccgatgtcacccagccggtacccaaggcggcgcttctgaacgcgatcagaaagcttcatgtgggcaaagtcggggagaacgggtatgtggagatagaggatgacattggaaggagggcagaaatgaatgaacttatggagcagacctcggagatcatcacgtttgccgagtcaggaacagccaggaagacgctgcacttcgagatttccaaggaaggcagtgacctgtcagtggtggagcgtgcagaagtctggctcttcctaaaagtccccaaggccaacaggaccaggaccaaagtcaccatccgcctcttccagcagcagaagcacccgcagggcagcttggacacaggggaagaggccgaggaagtgggcttaaagggggagaggagtgaactgttgctctctgaaaaagtagtagacgctcggaagagcacctggcatgtcttccctgtctccagcagcatccagcggttgctggaccagggcaagagctccctggacgttcggattgcctgtgagcagtgccaggagagtggcgccagcttggttctcctgggcaagaagaagaagaaagaagaggagggggaagggaaaaagaagggcggaggtgaaggtggggcaggagcagatgaggaaaaggagcagtcgcacagacctttcctcatgctgcaggcccggcagtctgaagaccaccctcatcgccggcgtcggcggggcttggagtgtgatggcaaggtcaacatctgctgtaagaaacagttctttgtcagtttcaaggacatcggctggaatgactggatcattgctccctctggctatcatgccaactactgcgagggtgagtgcccgagccatatagcaggcacgtccgggtcctcactgtccttccactcaacagtcatcaaccactaccgcatgcggggccatagcccctttgccaacctcaaatcgtgctgtgtgcccaccaagctgagacccatgtccatgttgtactatgatgatggtcaaaacatcatcaaaaaggacattcagaacatgatcgtggaggagtgtgggtgctcatagagttgcccagcccagggggaaagggagcaagagttgtccagagaagacagtggcaaaatgaagaaatttttaaggtttctgagttaaccagaaaaatagaaattaaaaacaaaacaaaacaaaaaaaaaaacaaaaaaaaacaaaagtaaattaaaaacaaacctgatgaaacagatgaaacagatgaaggaagatgtggaaatcttagcctgccttagccagggctcagagatgaagcagtgaagagacagattgggagggaaagggagaatggtgtaccctttatttcttctgaaatcacactgatgacatcagttgtttaaacggggtattgtcctttccccccttgaggttcccttgtgagcttgaatcaaccaatctgatctgcagtagtgtggactagaacaacccaaatagcatctagaaagccatgagtttgaaagggcccatcacaggcactttcctagcctaat

SEQ ID NO: 89 - protein, 426 aa, Homo Sapiens
MPLLWLRGFLLASCWIIVRSSPTPGSEGHSAAPDCPSCALAALPKDVPNSQPEMVEAVKKHILNMLHLKKRPDVTQPVPKAALLNAIRKLHVGKVGENGYVEIEDDIGRRAEMNELMEQTSEIITFAESGTARKTLHFEISKEGSDLSVVERAEVWLFLKVPKANRTRTKVTIRLFQQQKHPQGSLDTGEEAEEVGLKGERSELLLSEKVVDARKSTWHVFPVSSSIQRLLDQGKSSLDVRIACEQCQESGASLVLLGKKKKKEEEGEGKKKGGGEGGAGADEEKEQSHRPFLMLQARQSEDHPHRRRRRGLECDGKVNICCKKQFFVSFKDIGWNDWIIAPSGYHANYCEGECPSHIAGTSGSSLSFHSTVINHYRMRGHSPFANLKSCCVPTKLRPMSMLYYDDGQNIIKKDIQNMIVEECGCS

SEQ ID NO: 90 - DNA, 2238 bp, Homo Sapiens
  CDS (397)...(1680)
gtccttcggtgtctgggtgtggtgagtagaggtgtgtgtcacaaagtacagaccattgtgtgtgacaaagcccatcgtgtgtctgtgtgtgtctttatccacgtggatggacgtctctttcttgctctgccccaagacacaccctagcccctccttattctcaaaagggggagctggggagcctccccctaccctggggcctcccctgcccctccccgccctgcctggccgtcaccactccccagagggcacagggctctgctgtgcctcagagcaaaagtcccagagccagcagagcaggctgacgacctgcaagccacagtggctgccctgtgcgtgctgcgaggtgggggaccctgggcaggaagctggctgagccccaagaccccgggggccatgggcggggatctggtgcttggcctgggggccttgagacgccgaaagcgcttgctggagcaggagaagtctctggccggctgggcactggtgctggcaggaactggcattggactcatggtgctgcatgcagagatgctgtggttcggggggtgctcgtgggcgctctacctgttcctggttaaatgcacgatcagcatttccaccttcttactcctctgcctcatcgtggcctttcatgccaaagaggtccagctgttcatgaccgacaacgggctgcgggactggcgcgtggcgctgaccgggcggcaggcggcgcagatcgtgctggagctggtggtgtgtgggctgcacccggcgcccgtgcggggcccgccgtgcgtgcaggatttaggggcgccgctgacctccccgcagccctggccgggattcctgggccaaggggaagcgctgctgtccctggccatgctgctgcgtctctacctggtgccccgcgccgtgctcctgcgcagcggcgtcctgctcaacgcttcctaccgcagcatcggcgctctcaatcaagtccgcttccgccactggttcgtggccaagctttacatgaacacgcaccctggccgcctgctgctcggcctcacgcttggcctctggctgaccaccgcctgggtgctgtccgtggccgagaggcaggctgttaatgccactgggcacctttcagacacactttggctgatccccatcacattcctgaccatcggctatggtgacgtggtgccgggcaccatgtggggcaagatcgtctgcctgtgcactggagtcatgggtgtctgctgcacagccctgctggtggccgtggtggcccggaagctggagtttaacaaggcagagaagcacgtgcacaacttcatgatggatatccagtataccaaagagatgaaggagtccgctgcccgagtgctacaagaagcctggatgttctacaaacatactcgcaggaaggagtctcatgctgcccgcaggcatcagcgcaagctgctggccgccatcaacgcgttccgccaggtgcggctgaaacaccggaagctccgggaacaagtgaactccatggtggacatctccaagatgcacatgatcctgtatgacctgcagcagaatctgagcagctcacaccgggccctggagaaacagattgacacgctggcggggaagctggatgccctgactgagctgcttagcactgccctggggccgaggcagcttccagaacccagccagcagtccaagtagctggacccacgaggaggaaccaggctactttccccagtactgaggtggtggacatcgtctctgccactcctgacccagccctgaacaaagcacctcaagtgcaaggaccaaagggggccctggcttggagtgggttggcttgctgatggctgctggaggggacgctggctaaagtgggtaggccttggcccacctgaggccccaggtgggaacatggtcacccccactctgcataccctcatcaaaaacactctcactatgctgctatggacgacctccagctctcagttacaagtgcaggcgactggaggcaggactcctgggtccctgggaaagagggtactaggggcccggatccaggattctgggaggcttcagttaccgctggccgagctgaagaactgggtatgaggctggggcggggctggaggtggcgccccctggtgggacaacaaagaggacaccatttttccagagctgcagagagcacctggtggggaggaagaagtgtaactcaccagcctctgctcttatctttgtaataaatgttaaagccag

SEQ ID NO: 91 - protein, 427 aa, Homo Sapiens
MGGDLVLGLGALRRRKRLLEQEKSLAGWALVLAGTGIGLMVLHAEMLWFGGCSWALYLFLVKCTISISTFLLLCLIVAFHAKEVQLFMTDNGLRDWRVALTGRQAAQIVLELVVCGLHPAPVRGPPCVQDLGAPLTSPQPWPGFLGQGEALLSLAMLLRLYLVPRAVLLRSGVLLNASYRSIGALNQVRFRHWFVAKLYMNTHPGRLLLGLTLGLWLTTAWVLSVAERQAVNATGHLSDTLWLIPITFLTIGYGDVVPGTMWGKIVCLCTGVMGVCCTALLVAVVARKLEFNKAEKHVHNFMMDIQYTKEMKESAARVLQEAWMFYKHTRRKESHAARRHQRKLLAAINAFRQVRLKHRKLREQVNSMVDISKMHMILYDLQQNLSSSHRALEKQIDTLAGKLDALTELLSTALGPRQLPEPSQQSK

SEQ ID NO: 92 - DNA, 6549 bp, Homo Sapiens
  CDS (240)...(4904)
ccacaattacaagttcatccgaaaatgatgaccggagtggctccagtttggaatggaataaagatggaaacctaagattaggggttcagaagggagtgcttcatgaccgcagggcagataactgctccccagtggcagaagaggagaccaccgggtcagcagagagcacgctgcccaaagcagaatcctcagctggagatggtccagtcccttattctcagggctccagctcactaataatgccacggcccaactcagttgcagcaacaagctcaaccaaattggaagatctgagttatttagacgggcagagaaatgctcctctacggacgtcaattagattaccatggcacaatacggccggaggtagggcacaggaagttaaagcacgatttgctccctacaagccacaagacattttgttgaaacccttgttgtttgaagtaccaagcataacaacagactctgtgtttgtgggaagggattggctctttcaccagatagaagaaaacttgaggaacacagaactggcagaaaacagaggcgcggtggtggttggcaatgtgggatttgggaagacggcaatcatttccaagttggtggccctgagctgccacggaagccgcatgaggcagattgcttccaacagcccgggttcatcacctaaaacctctgaccccactcaggatcttcatttcactccgttgctttcaccgagttcttccacaagtgcttccagcacagctaaaacacctcttgggtctatcagtgctgaaaaccagagaccaagagaggatgcagtgaaatatcttgcttctaaggtggtggcctaccactactgccaggctgacaacacgtacacttgcctggtgcccgagtttgtgcacagcatcgcagctttgctctgccggtcccatcagctggccgcctacagagaccttctgataaaggagccccaactacagagcatgctgagcctccgatcctgtgtgcaggacccggtggcagctttcaagaggggagtgctggagccactcacaaacctgagaaatgagcagaaaattcctgaagaagaatacattattttgatagatggcttaaatgaagctgagtttcataaacctgattatggagatacgctttcttcatttattaccaaaattatttctaaatttcctgcctggttgaagttgattgtgactgtaagagcaaattttcaggaaatcataagtgcgctgccatttgtcaagctttccttagatgacttcccagacaacaaagacatccacagtgacctgcacgcctacgtccagcacagggtgcacagcagccaggacatcctcagcaacatctccctgaatggcaaggccgatgccacactcattggaaaagtgagcagccacctggtgctgcggagcctcggctcctacctgtacctcaagctcaccctggaccttttccagaggggccacttggtcattaagagtgccagctacaaggtggtgcccgtgtctctctctgagctctatttgcttcagtgcaacatgaagttcatgacccagtccgcctttgagagggcacttccgattctcaacgtggccctcgcatccctccaccccatgacagacgagcagatctttcaggctattaatgctggccacatccagggggagcagggatgggaagactttcagcagaggatggacgccctctcctgcttcctcattaagaggcgagacaaaacccgcatgttctgccacccgtccttcagggagtggcttgtatggagagcagacggggaaaacacggccttcctgtgtgagcccaggaacgggcacgcgctcttggcattcatgttctcgcgtcaggagggcaagttgaaccgccagcagaccatggagcttggccaccacatcctgaaggcgcacattttcaagggcctcagtaagaagacgggaatttcttcaagccatctccaagccctgtggatcggctacagcaccgaggggctgtccgccgccctggcctctctcaggaatctctatactcccaacgtgaaggtgagccgtctcctgattttgggaggggccaacgtgaactacaggacagaagtgttaaataatgccccaatcctgtgcgtccagtctcaccttggccacgaggaagttgtcactctgctcctggaatttggtgcctgcctggacggaacgtcagagaacggcatgactgccctctgttacgcagcagctgctggccacatgaagctggtgtgtctgctgaccaagaagggagtgagagtggaccacttggataagaagggccagtgtgcgcttgtccacagtgccctacggggccacggtgacattctccagtacctgctgacttgtgagtggtcgccgggtcctccccagccaggcaccctgaggaagagccacgccctgcagcaggcgctgaccgcggcggccagcatgggccacagctcggtggtccagtgcttgctggggatggagaaggaacatgaagtagaagtcaatggcaccgacacattgtggggagaaacagccctgactgccgccgcaggaagagggaagctggaggtctgtgagctgctgctggggcatggagctgctgtgtcgcggacaaacaggagaggggttccacctttgttttgtgcagcacgccaggggcattggcagattgttagactgctgttggaacgcggctgtgatgtgaacctaagtgacaagcaaggccggacgcccctcatggtggctgcttgtgaagggcacttgagcaccgtggaattcctcctttcaaaaggtgcagccctttcttctctagacaaagagggtctgtcagcattaagctgggcttgtctgaaaggtcacagggcagtggtccagtatctggttgaagaaggagctgcaatagaccagacagacaagaatggccgcacacccttggacctggctgccttctatggcgatgccgagactgtgctgtacctggtggagaagggagccgtgatcgagcatgtggaccacagcgggatgcggcccttggacagagccatcggctgccggaacacatctgtagtggtggcgctactcagaaagggagccaagttaggaaatgctgcttgggcgatggccacttccaaacctgatatcttgattatacttttacagaaattaatggaggaaggaaatgtgatgtacaaaaaagggaaaatgaaagaggcagcccagaggtaccagtatgccttaagaaagtttcctcgagaaggattcggagaggacatgagacccttcaatgaattaagggtttccctctatctcaatttgtcgcgatgccgaagaaaaacaaatgactttggcatggcagaggaatttgcttccaaggctctcgaattgaagcccaagtcctatgaagccttttatgccagagcaagagcgaagagaaatagcaggcaattcgtggcagctctggctgacctgcaagaggctgtgaaactctgtcccaccaatcaggaagtcaagaggcttctggcccgcgtagaagaggagtgcaaacaactccagaggagtcaacagcaaaaacagcagggcccgctaccagctccactcaacgactccgagaacgaagaggacaccccaacccctggcttaagtgaccactttcactctgaggagactgaagaggaagaaacttctccccaggaagaatctgtttccccaactcccaggtcccagccatcctcatctgtcccttcctcatacatccgaaaccttcaagaagggttacagtccaaaggaaggccggtatcgccacagagcagggcaggaatcggcaagtccctgagagagcctgtggcccagccagggctgctcctgcagccctccaagcaggcccagatcgtgaaaaccagccagcacctgggctctggccagtcggcagtgagaaatggcagtatgaaagttcagatctcttctcagaaccctcctccaagtcccatgccagggagaatcgctgccactcctgctgggagcagaacccagcatttagagggaacaggtactttcactacaagagctggttgtggccactttggggatcggctgggccccagccagaatgtccgcctgcagtgtggtgagaatggccctgcacaccctttaccaagtaagacgaaaaccacagagaggcttctgtctcattcctccgtggctgtggacgcagcccctccaaaccaaggtgggctggcgacctgcagcgacgtgcgacacccagcttccctcaccagctcaggctcttctggttctccatccagcagcataaagatgtcaagttcaaccagtagtttgacttcgagcagcagtttttcagatggcttcaaggtccaaggaccagatactagaattaaagacaaggttgtaacccacgttcagagcggtacagctgagcacagaccccgcaacacgccgttcatgggcatcatggataagactgcgaggttccaacagcagagcaatcctccaagccgcagctggcactgtccggcaccagaggggctgctgacaaacacgtcttctgcagctggcctgcagtctgctaacactgagaagccctctctcatgcaagtgggaggatataataaccaagccaaaacctgttctgtttctaccctgagtgcaagtgtccacaatggggcacaagtgaaggagctagaagaaagcaagtgccaaattccagtccactctcaagagaacaggataactaagactgtttctcatctgtaccaggaaagtatctccaaacagcagcctcatattagtaatgaagcccacaggagccacctcactgcagccaaaccaaagcgatcatttatagagtcaaatgtgtgaaccttaagaaatccccatttgtggaatttggaaacgtgtgttgactcctggtggtaaattaaatagtttttttcatcagaaaaattattttttagccattttttttctttggggtggatctgatgccattgatatatctaaaatgtgggataaaacttctttaatagctagaaatcaccataaataagaatgctaaacagaattgaaaattatatcaacttaaaattttaagacagcccagaagacattaatgactctcacttatgaaattgtttggcttttgccactttcttccttgcctttgctatatggtagaatcacagaacttacttagagaataaatatgtctattgttcaagagtaacaggtttaactcatgaccaagtgatgtacatccaagtgatgtattctggaaacgatggaattttacagttacagttccattgagtcaaatcccattttatatatacataaaaattaagttctgagtgagttctagctaaatataagtgcgactgtaaacgcagccaatttttttaagcagaatatgagaacacctaagtattctcttcatagcagttcctataaagggattaaacacttatttctgtgttatggttcttattcatatatttttatagcacttttggaacctatatttgtgcttgaaggtgtttttgatatttggaaacagtataagccatttggagtcatgattggtggtcaagtggattcaagctaaaatactaagaccagcattcttagtggcgcttataaattagctctcacctggtttccaaactgcttttaacaatggtagtgctcctggaacaatccttccaagctcctctaaggacaatatttaattcagatactaaaggtaagactggttgttacttttgttttgttgtacaattagtactttatagtcacatgttgtatatattaaatagcccagttttattcagacttgtaaatagaactatttcaatgtagttaatctaaaaacaaaaaagaaaaccccagtcacgatttgcatgttctctgtaagcttcatccatgctggttattgcactgaatgatatattattagggcatgttaacagtataccagtaacagcactttatctcatttatatgaacacctttgaggtgctacttaagtccaagctctgatgtattattcatttgtaaagataaggtacaggaatgaaccttggtttaaaggtatttttatatgaaaatggtgtgttattggaagatgttaaaatgctaatttgagagaagtaggagtgtatctgttttatatgttgggatgtgaaatttattttctaaaattgaggagaaggaagttatatatttgcagaatgttttaaagtgaattgttgtaatgaagttcctgtgaacatcattatggttttgtacaaataggaacctctgatgtcattcttcaacgtttgttcctgtgtgtacaattgtactttgtatgaacagctttatcatttttataggctttccatgagttttgctgtaactactatggcttatttattttctttaatatttgtgaaagtcttactcctttgttagttttgtttctgcacaactactgtacttttccatatggaataaagactattaatag

SEQ ID NO: 93 - protein, 1554 aa, Homo Sapiens
MPRPNSVAATSSTKLEDLSYLDGQRNAPLRTSIRLPWHNTAGGRAQEVKARFAPYKPQDILLKPLLFEVPSITTDSVFVGRDWLFHQIEENLRNTELAENRGAVVVGNVGFGKTAIISKLVALSCHGSRMRQIASNSPGSSPKTSDPTQDLHFTPLLSPSSSTSASSTAKTPLGSISAENQRPREDAVKYLASKVVAYHYCQADNTYTCLVPEFVHSIAALLCRSHQLAAYRDLLIKEPQLQSMLSLRSCVQDPVAAFKRGVLEPLTNLRNEQKIPEEEYIILIDGLNEAEFHKPDYGDTLSSFITKIISKFPAWLKLIVTVRANFQEIISALPFVKLSLDDFPDNKDIHSDLHAYVQHRVHSSQDILSNISLNGKADATLIGKVSSHLVLRSLGSYLYLKLTLDLFQRGHLVIKSASYKVVPVSLSELYLLQCNMKFMTQSAFERALPILNVALASLHPMTDEQIFQAINAGHIQGEQGWEDFQQRMDALSCFLIKRRDKTRMFCHPSFREWLVWRADGENTAFLCEPRNGHALLAFMFSRQEGKLNRQQTMELGHHILKAHIFKGLSKKTGISSSHLQALWIGYSTEGLSAALASLRNLYTPNVKVSRLLILGGANVNYRTEVLNNAPILCVQSHLGHEEVVTLLLEFGACLDGTSENGMTALCYAAAAGHMKLVCLLTKKGVRVDHLDKKGQCALVHSALRGHGDILQYLLTCEWSPGPPQPGTLRKSHALQQALTAAASMGHSSVVQCLLGMEKEHEVEVNGTDTLWGETALTAAAGRGKLEVCELLLGHGAAVSRTNRRGVPPLFCAARQGHWQIVRLLLERGCDVNLSDKQGRTPLMVAACEGHLSTVEFLLSKGAALSSLDKEGLSALSWACLKGHRAVVQYLVEEGAAIDQTDKNGRTPLDLAAFYGDAETVLYLVEKGAVIEHVDHSGMRPLDRAIGCRNTSVVVALLRKGAKLGNAAWAMATSKPDILIILLQKLMEEGNVMYKKGKMKEAAQRYQYALRKFPREGFGEDMRPFNELRVSLYLNLSRCRRKTNDFGMAEEFASKALELKPKSYEAFYARARAKRNSRQFVAALADLQEAVKLCPTNQEVKRLLARVEEECKQLQRSQQQKQQGPLPAPLNDSENEEDTPTPGLSDHFHSEETEEEETSPQEESVSPTPRSQPSSSVPSSYIRNLQEGLQSKGRPVSPQSRAGIGKSLREPVAQPGLLLQPSKQAQIVKTSQHLGSGQSAVRNGSMKVQISSQNPPPSPMPGRIAATPAGSRTQHLEGTGTFTTRAGCGHFGDRLGPSQNVRLQCGENGPAHPLPSKTKTTERLLSHSSVAVDAAPPNQGGLATCSDVRHPASLTSSGSSGSPSSSIKMSSSTSSLTSSSSFSDGFKVQGPDTRIKDKVVTHVQSGTAEHRPRNTPFMGIMDKTARFQQQSNPPSRSWHCPAPEGLLTNTSSAAGLQSANTEKPSLMQVGGYNNQAKTCSVSTLSASVHNGAQVKELEESKCQIPVHSQENRITKTVSHLYQESISKQQPHISNEAHRSHLTAAKPKRSFIESNV

SEQ ID NO: 94 - DNA, 1454 bp, Homo Sapiens
  CDS (82)...(912)
accagcggcagaccacaggcagggcagaggcacgtctgggtcccctccctccttcctatcggcgactcccagatcctggccatgagagctccgcacctccacctctccgccgcctctggcgcccgggctctggcgaagctgctgccgctgctgatggcgcaactctgggccgcagaggcggcgctgctcccccaaaacgacacgcgcttggaccccgaagcctatggcgccccgtgcgcgcgcggctcgcagccctggcaggtctcgctcttcaacggcctctcgttccactgcgcgggtgtcctggtggaccagagttgggtgctgacggccgcgcactgcggaaacaagccactgtgggctcgagtaggggatgatcacctgctgcttcttcagggcgagcagctccgccggacgactcgctctgttgtccatcccaagtaccaccagggctcaggccccatcctgccaaggcgaacggatgagcacgatctcatgttgctaaagctggccaggcccgtagtgccggggccccgcgtccgggccctgcagcttccctaccgctgtgctcagcccggagaccagtgccaggttgctggctggggcaccacggccgcccggagagtgaagtacaacaagggcctgacctgctccagcatcactatcctgagccctaaagagtgtgaggtcttctaccctggcgtggtcaccaacaacatgatatgtgctggactggaccggggccaggacccttgccagagtgactctggaggccccctggtctgtgacgagaccctccaaggcatcctctcgtggggtgtttacccctgtggctctgcccagcatccagctgtctacacccagatctgcaaatacatgtcctggatcaataaagtcatacgctccaactgatccagatgctacgctccagctgatccagatgttatgctcctgctgatccagatgcccagaggctccatcgtccatcctcttcctccccagtcggctgaactctccccttgtctgcactgttcaaacctctgccgccctccacacctctaaacatctcccctctcacctcattcccccacctatccccattctctgcctgtactgaagctgaaatgcaggaagtggtggcaaaggtttattccagagaagccaggaagccggtcatcacccagcctctgagagcagttactggggtcacccaacctgacttcctctgccactccccgctgtgtgactttgggcaagccaagtgccctctctgaacctcagtttcctcatctgcaaaatgggaacaatgacgtgcctacctcttagacatgttgtgaggagactatgatataacatgtgtatgtaaatcttcatgtgattgtcatgtaaggcttaacacagtgggtggtgagttctgactaaaggttacctgttgtcgtgaaaaaaaaaaaaaa

SEQ ID NO: 95 - protein, 276 aa, Homo Sapiens
MRAPHLHLSAASGARALAKLLPLLMAQLWAAEAALLPQNDTRLDPEAYGAPCARGSQPWQVSLFNGLSFHCAGVLVDQSWVLTAAHCGNKPLWARVGDDHLLLLQGEQLRRTTRSVVHPKYHQGSGPILPRRTDEHDLMLLKLARPVVPGPRVRALQLPYRCAQPGDQCQVAGWGTTAARRVKYNKGLTCSSITILSPKECEVFYPGVVTNNMICAGLDRGQDPCQSDSGGPLVCDETLQGILSWGVYPCGSAQHPAVYTQICKYMSWINKVIRSN

SEQ ID NO: 96 - DNA, 1506 bp, Homo Sapiens
  CDS (246)...(980)
aggcggacaaagcccgattgttcctgggccctttccccatcgcgcctgggcctgctccccagcccggggcaggggcgggggccagtgtggtgacacacgctgtagctgtctccccggctggctggctcgctctctcctggggacacagaggtcggcaggcagcacacagagggacctacgggcagctgttccttcccccgactcaagaatccccggaggcccggaggcctgcagcaggagcggccatgaagaagctgatggtggtgctgagtctgattgctgcagcctgggcagaggagcagaataagttggtgcatggcggaccctgcgacaagacatctcacccctaccaagctgccctctacacctcgggccacttgctctgtggtggggtccttatccatccactgtgggtcctcacagctgcccactgcaaaaaaccgaatcttcaggtcttcctggggaagcataaccttcggcaaagggagagttcccaggagcagagttctgttgtccgggctgtgatccaccctgactatgatgccgccagccatgaccaggacatcatgctgttgcgcctggcacgcccagccaaactctctgaactcatccagccccttcccctggagagggactgctcagccaacaccaccagctgccacatcctgggctggggcaagacagcagatggtgatttccctgacaccatccagtgtgcatacatccacctggtgtcccgtgaggagtgtgagcatgcctaccctggccagatcacccagaacatgttgtgtgctggggatgagaagtacgggaaggattcctgccagggtgattctgggggtccgctggtatgtggagaccacctccgaggccttgtgtcatggggtaacatcccctgtggatcaaaggagaagccaggagtctacaccaacgtctgcagatacacgaactggatccaaaaaaccattcaggccaagtgaccctgacatgtgacatctacctcccgacctaccaccccactggctggttccagaacgtctctcacctagaccttgcctcccctcctctcctgcccagctctgaccctgatgcttaataaacgcagcgacgtgagggtcctgattctccctggttttaccccagctccatccttgcatcactggggaggacgtgatgagtgaggacttgggtcctcggtcttacccccaccactaagagaatacaggaaaatcccttctaggcatctcctctccccaacccttccacacgtttgatttcttcctgcagaggcccagccacgtgtctggaatcccagctccgctgcttactgtcggtgtccccttgggatgtacctttcttcactgcagatttctcacctgtaagatgaagataaggatgatacagtctccatcaggcagtggctgttggaaagatttaagatttcacacctatgacatacatgggatagcacctgggccgccatgcactcaataaagaatgtatttt

SEQ ID NO: 97 - protein, 244 aa, Homo Sapiens
MKKLMVVLSLIAAAWAEEQNKLVHGGPCDKTSHPYQAALYTSGHLLCGGVLIHPLWVLTAAHCKKPNLQVFLGKHNLRQRESSQEQSSVVRAVIHPDYDAASHDQDIMLLRLARPAKLSELIQPLPLERDCSANTTSCHILGWGKTADGDFPDTIQCAYIHLVSREECEHAYPGQITQNMLCAGDEKYGKDSCQGDSGGPLVCGDHLRGLVSWGNIPCGSKEKPGVYTNVCRYTNWIQKTIQAK

SEQ ID NO: 98 - DNA, 2186 bp, Homo Sapiens
  CDS (204)...(1055)
acacggaccaaggagtctaacacgtgcgcgagtcgggggctcgcacgaaagccgccgtggcgcaatgaaggtgaaggccggcgcgctcgccggccgaggtgggatcccgaggcctctccagtccgccgagggcgcaccaccggcccgtctcgcccgccgcgccggggaggtggagcacgagcgcacgtgttaggacccgaaagatggtgaactatgcctgggcagggcgaagccagaggaaactctggtggaggtccgtagcggtcctgacgtgcaaatcggtcgtccgacctgggtataggggcgggctccaggcgaggcggtcgacgctcctgaaaacttgcgcgcgcgctcgcgccactgcgcccggagcgatgaagatggtcgcgccctggacgcggttctactccaacagctgctgcttgtgctgccatgtccgcaccggcaccatcctgctcggcgtctggtatctgatcatcaatgctgtggtactgttgattttattgagtgccctggctgatccggatcagtataacttttcaagttctgaactgggaggtgactttgagttcatggatgatgccaacatgtgcattgccattgcgatttctcttctcatgatcctgatatgtgctatggctacttacggagcgtacaagcaacgcgcagcctggatcatcccattcttctgttaccagatctttgactttgccctgaacatgttggttgcaatcactgtgcttatttatccaaactccattcaggaatacatacggcaactgcctcctaattttccctacagagatgatgtcatgtcagtgaatcctacctgtttggtccttattattcttctgtttattagcattatcttgacttttaagggttacttgattagctgtgtttggaactgctaccgatacatcaatggtaggaactcctctgatgtcctggtttatgttaccagcaatgacactacggtgctgctacccccgtatgatgatgccactgtgaatggtgctgccaaggagccaccgccaccttacgtgtctgcctaagccttcaagtgggcggagctgagggcagcagcttgactttgcagacatctgagcaatagttctgttatttcacttttgccatgagcctctctgagcttgtttgttgctgaaatgctactttttaaaatttagatgttagattgaaaactgtagttttcaacatatgctttgctagaacactgtgatagattaactgtagaattcttcctgtacgattggggatataatgggcttcactaaccttccctaggcattgaaacttcccccaaatctgatggacctagaagtctgcttttgtacctgctgggccccaaagttgggcatttttctctctgttccctctcttttgaaaatgtaaaataaaaccaaaaatagacaactttttcttcagccattccagcatagagaacaaaaccttatggaaacaggaatgtcaattgtgtaatcattgttctaattaggtaaatagaagtccttatgtatgtgttacaagaatttcccccacaacatcctttatgactgaagttcaatgacagtttgtgtttgggtggtaaaggattttctccatggcctgaattaagaccattagaaagcaccaggccgtgggagcagtgaccatctgctgactgttcttgtggatcttgtgtccagggacatggggtgacatgcctcgtatgtgttagagggtggaatggatgtgtttggcgctgcatgggatctggtgcccctcttctcctggattcacatccccacccagggcccgcttttactaagtgttctgccctagattggttcaaggaggtcatccaactgactttatcaagtggaattgggatatatttgatatacttctgcctaacaacatggaaaagggttttcttttccctgcaagctacatcctactgctttgaacttccaagtatgtctagtcaccttttaaaatgtaaacattttcagaaaaatgaggattgccttccttgtatgcgctttttaccttgactacctgaattgcaagggatttttatatattcatatgttacaaagtcagcaactctcctgttggttcattattgaatgtgctgtaaattaagttgtttgcaattaaaacaaggtttgcccacaaaaaaaaaa

SEQ ID NO: 99 - protein, 283 aa, Homo Sapiens
MVNYAWAGRSQRKLWWRSVAVLTCKSVVRPGYRGGLQARRSTLLKTCARARATAPGAMKMVAPWTRFYSNSCCLCCHVRTGTILLGVWYLIINAVVLLILLSALADPDQYNFSSSELGGDFEFMDDANMCIAIAISLLMILICAMATYGAYKQRAAWIIPFFCYQIFDFALNMLVAITVLIYPNSIQEYIRQLPPNFPYRDDVMSVNPTCLVLIILLFISIILTFKGYLISCVWNCYRYINGRNSSDVLVYVTSNDTTVLLPPYDDATVNGAAKEPPPPYVSA

SEQ ID NO: 100 - DNA, 597 bp, Homo Sapiens
  CDS (1)...(597)
atgcccctaggtctcctgtggctgggcctagccctgttgggggctctgcatgcccaggcccaggactccacctcagacctgatcccagccccacctctgagcaaggtccctctgcagcagaacttccaggacaaccaattccaggggaagtggtatgtggtaggcctggcagggaatgcaattctcagagaagacaaagacccgcaaaagatgtatgccaccatctatgagctgaaagaagacaagagctacaatgtcacctccgtcctgtttaggaaaaagaagtgtgactactggatcaggacttttgttccaggttgccagcccggcgagttcacgctgggcaacattaagagttaccctggattaacgagttacctcgtccgagtggtgagcaccaactacaaccagcatgctatggtgttcttcaagaaagtttctcaaaacagggagtacttcaagatcaccctctacgggagaaccaaggagctgacttcggaactaaaggagaacttcatccgcttctccaaatatctgggcctccctgaaaaccacatcgtcttccctgtcccaatcgaccagtgtatcgacggctga

SEQ ID NO: 101 - protein, 198 aa, Homo Sapiens
MPLGLLWLGLALLGALHAQAQDSTSDLIPAPPLSKVPLQQNFQDNQFQGKWYVVGLAGNAILREDKDPQKMYATIYELKEDKSYNVTSVLFRKKKCDYWIRTFVPGCQPGEFTLGNIKSYPGLTSYLVRVVSTNYNQHAMVFFKKVSQNREYFKITLYGRTKELTSELKENFIRFSKYLGLPENHIVFPVPIDQCIDG

SEQ ID NO: 102 - DNA, 2420 bp, Homo Sapiens
  CDS (448)...(1938)
gtccgcttgcggtttgggaagaaaaggcgatgcctccgccaagaaaagagcgagcagcggccccctcccccctccgccgagcccgggcggcggcggcggcacatctaacgcgcgggcacccgggccgccgcggcccccgcaaataagcccagcctcggcccccgccgctcattggcgcgggccgcagccagcgcacccagaccctgcgctgccctcggacggccgggcgcggaccccagctgcggaggccgacggcacccggccccgagcgcctcgacgccgagccgcgcgcgccttctccgccaggcccggcgggcgggagcgggggcgagggagcaggagcggccagtgcccccgacacccccggcccggcacccccggcccggcatcccccgccgccgccgccgccgcctcaaggccgcccgctccccgcaggtggacgcggccatgggccgaggggtgcgcgtgctgctgctgctgagcctgctgcactgcgccgggggcagcgagggcaggaagacctggcggcgccggggtcagcagccgcctcctcccccgcggaccgaggcggcgccggcggccggacagcccgtggagagcttcccgctggacttcacggccgtggagggtaacatggacagcttcatggcgcaagtcaagagcctggcgcagtccctgtacccctgctccgcgcagcagctcaacgaggacctgcgcctgcacctcctactcaacacctcggtgacctgcaacgacggcagccccgccggctactacctgaaggagtccaggggcagccggcggtggctcctcttcctggaaggcggctggtactgcttcaaccgcgagaactgcgactccagatacgacaccatgcggcgcctcatgagctcccgggactggccgcgcactcgcacaggcacagggatcctgtcctcacagccggaggagaacccctactggtggaacgcaaacatggtcttcatcccctactgctccagtgatgtttggagcggggcttcatccaagtctgagaagaacgagtacgccttcatgggcgccctcatcatccaggaggtggtgcgggagcttctgggcagagggctgagcggggccaaggtgctgctgctggccgggagcagcgcggggggcaccggggtgctcctgaatgtggaccgtgtggctgagcagctggagaagctgggctacccagccatccaggtgcgaggcctggctgactccggctggttcctggacaacaagcagtatcgccacacagactgcgtcgacacgatcacgtgcgcgcccacggaggccatccgccgtggcatcaggtactggaacggggtggtcccggagcgctgccgacgccagttccaggagggcgaggagtggaactgcttctttggctacaaggtctacccgaccctgcgctgccctgtgttcgtggtgcagtggctgtttgacgaggcacagctgacggtggacaacgtgcacctgacggggcagccggtgcaggagggcctgcggctgtacatccagaacctcggccgcgagctgcgccacacactcaaggacgtgccggccagctttgcccccgcctgcctctcccatgagatcatcatccggagccactggacggatgtccaggtgaaggggacgtcgctgccccgagcactgcactgctgggacaggagcctccatgacagccacaaggccagcaagacccccctcaagggctgccccgtccacctggtggacagctgcccctggccccactgcaacccctcatgccccaccgtccgagaccagttcacggggcaagagatgaacgtggcccagttcctcatgcacatgggcttcgacatgcagacggtggcccagccgcagggactggagcccagtgagctgctggggatgctgagcaacggaagctaggcagactgtctggaggaggagccggcactgagggggcccagacaccsgytgccccaagtgccacytcaccccccaccaggcagggccctcccgtctcttcggggacaggggccccagccgtcccccctgtctgggtctgcccactgccctcctgccccggctttccctgcccctctcccacagcccagccagagacaagggacctgctgtcatccccatctgtggcctgggggtccttcctgacaacgagggggtagccagaagagaagcactggattcctcagtccaccagctcagacagcacccaccggccccacccatcaagcccttttatattattttataaagtgacttttttattactttaattttttaaaaaaaggaaaataagaatatatgatgaatgatattgttttgtaactttttaaaaatgattttaaagagacaaaaaagaaaaaaaaaaaaaaaaaaaaaaaaaaaaa

SEQ ID NO: 103 - protein, 496 aa, Homo Sapiens
MGRGVRVLLLLSLLHCAGGSEGRKTWRRRGQQPPPPPRTEAAPAAGQPVESFPLDFTAVEGNMDSFMAQVKSLAQSLYPCSAQQLNEDLRLHLLLNTSVTCNDGSPAGYYLKESRGSRRWLLFLEGGWYCFNRENCDSRYDTMRRLMSSRDWPRTRTGTGILSSQPEENPYWWNANMVFIPYCSSDVWSGASSKSEKNEYAFMGALIIQEVVRELLGRGLSGAKVLLLAGSSAGGTGVLLNVDRVAEQLEKLGYPAIQVRGLADSGWFLDNKQYRHTDCVDTITCAPTEAIRRGIRYWNGVVPERCRRQFQEGEEWNCFFGYKVYPTLRCPVFVVQWLFDEAQLTVDNVHLTGQPVQEGLRLYIQNLGRELRHTLKDVPASFAPACLSHEIIIRSHWTDVQVKGTSLPRALHCWDRSLHDSHKASKTPLKGCPVHLVDSCPWPHCNPSCPTVRDQFTGQEMNVAQFLMHMGFDMQTVAQPQGLEPSELLGMLSNGS

SEQ ID NO: 104 - DNA, 675 bp, Homo Sapiens
  CDS (167)...(595)
gcgtccgagcatctccagcattctcagccacaaccaaaaaaaatataaagggcagccctccttaccactgtggaagtccctcagaggccttggggcatgacccagtgaagatgcaggtttgaccaggaaagcagcgctagtggagggttggagaaggaggtaaaggatgagggttcatcatccctccctgcctaaggaagctaaaagcatggccctgctgcccctccctgcctccacccacagtggagagggctacaaaggaggacaagaccctctcaggctgtcccaagctcccaagagcttccagagctctgacccacagcctccaagtcaggtggggtggagtcccagagctgcacagggtttggcccaagtttctaagggaggcacttcctcccctcgcccatcagtgccagcccctgctggctggtgcctgagcccctcagacagccccctgccccgcaggcctgccttctcagggacttctgcggggcctgaggcaagccatggagtgagacccaggagccggacacttctcaggaaatggcttttcccaacccccagcccccacccggtggttcttcctgttctgtgactgtgtatagtgccaccacagcttatggcatctcattgaggacaaagaaaactgcacaataaaaccaagcctctggaatc

SEQ ID NO: 105 - protein, 142 aa, Homo Sapiens
MRVHHPSLPKEAKSMALLPLPASTHSGEGYKGGQDPLRLSQAPKSFQSSDPQPPSQVGWSPRAAQGLAQVSKGGTSSPRPSVPAPAGWCLSPSDSPLPRRPAFSGTSAGPEASHGVRPRSRTLLRKWLFPTPSPHPVVLPVL

SEQ ID NO: 106 - DNA, 4785 bp, Homo Sapiens
  CDS (230)...(1484)
ggccaggactgagaaaggggaaagggaagggtgccacgtccgagcagccgccttgactggggaagggtctgaatcccacccttggcattgcttggtggagactgagatacccgtgctccgctcgcctccttggttgaagatttctccttccctcacgtgatttgagccccgtttttattttctgtgagccacgtcctcctcgagcggggtcaatctggcaaaaggagtgatgcgcttcgcctggaccgtgctcctgctcgggcctttgcagctctgcgcgctagtgcactgcgcccctcccgccgccggccaacagcagcccccgcgcgagccgccggcggctccgggcgcctggcgccagcagatccaatgggagaacaacgggcaggtgttcagcttgctgagcctgggctcacagtaccagcctcagcgccgccgggacccgggcgccgccgtccctggtgcagccaacgcctccgcccagcagccccgcactccgatcctgctgatccgcgacaaccgcaccgccgcggggcgaacgcggacggccggctcatctggagtcaccgctggccgccccaggcccaccgcccgtcactggttccaagctggctactcgacatctagagcccgcgaagctgggccctcgcgcgcggagaaccagacagcgccgggagaagttcctgctctcagtaacctgcggccgcccagccgcgtggacggcatggtgggcgacgacccttacaacccctacaagtactctgacgacaacccttattacaactactacgatacttatgaaaggcccagacctgggggcaggtaccggcccggatacggcactggctacttccagtacggtctcccagacctggtggccgacccctactacatccaggcgtccacgtacgtgcagaagatgtccatgtacaacctgagatgcgcggcggaggaaaactgtctggccagtacagcatacagggcagatgtcagagattatgatcacagggtgctgctcagatttccccaaagagtgaaaaaccaagggacatcagatttcttacccagccgaccaagatattcctgggaatggcacagttgtcatcaacattaccacagtatggatgagtttagccacttgtacctgcttgatgccaacacccagaggagatgggctgaaggccacaaagcaagtttctgtcttgaagacacatcctgtgactatggctaccacaggcgatttgcatgtactgcacacacacagggattgagtcctggctgttatgatacctatggtgcagacatagactgccagtggattgatattacagatgtaaaacctggaaactatatcctaaaggtcagtgtaaaccccagctacctggttcctgaatctgactataccaacaatgttgtgcgctgtgacattcgctacacaggacatcatgcgtatgcctcaggctgcacaatttcaccgtattagaaggcaaagcaaaactcccaatggataaatcagtgcctggtgttctgaagtgggaaaaaatagactaacttcagtaggatttatgtattttgaaaaagagaacagaaaacaacaaaagaatttttgtttggactgttttcaataacaaagcacataactggattttgaacgcttaagtcatcattacttgggaaatttttaatgtttattatttacatcactttgtgaattaacacagtgtttcaattctgtaattacatatttgactctttcaaagaaatccaaatttctcatgttccttttgaaattgtagtgcaaaatggtcagtattatctaaatgaatgagccaaaatgactttgaactgaaacttttctaaagtgctggaactttagtgaaacataataataatgggtttatatatgtcatagcatagatgaatttagaaacaatgctcctactgtttaaatacatatggacacatctggtgctgagaaagaaacaaacacattaccattggtgtcaagaaatattactatatagcagagaaatggcaatacatgtactcagatagttacatccctatataaaaagtatgtttacatttaaaaaattagtagataacttcctttctttcaagtgcacaatttcattttgacttgagtcaacttttgttttggaacaaattaagtaagggagctgcccaatcctgtctgatatttcttgaggctgccctctatcattttatctttcccatgggcagagatgttgtaagtgggattcttaatatcaccattcttgggactggtatacataaggcagccgtgaaactggaaagtcattttgatgactgatgtgatacatccagaggtaaaatgcatttaaacatattaaagtatttgccaaagatacaattttcttgctgacataaaaatcacacaaacaagtcccccccaaaccacaactgtctctcaaatagcttaaaaaaattgaaaaacattttaggatttttcaagttttctagattttaaaaagatgttcagctattagaggaatgttaaaaattttatattatctagaacacaggaacatcatcctgggttattcaggaatcagtcacacatgtgtgtgtgtctgagatatagtctaaattagcaaagcacatagtattacatacttgaggggttggtgaacaaaggaaaaatatactttctgcaaaaccaaggactgtgctgcgtaatgagacagctgtgatttcatttgaaactgtgaaaccatgtgccataatagaattttgagaattttgcttttacctaaattcaagaaaatgaaattacacttttaagttagtggtgcttaagcataatttttcctatattaaccagtattaaaatctcaagtaagattttccagtgccagaacatgttaggtggaattttaaaagtgcctcggcatcctgtattacatgtcatagaattgtaaagtcaacatcaattactagtaatcattctgcactcactgggtgcatagcatggttagaggggctagagatggacagtcatcaactggcggatatagcggtacatatgatccttagccaccagggcacaagcttaccagtagacaatacagacagagcttttgttgagctgtaactgagctatggaatagcttctttgatgtacctctttgccttaaattgctttttagttctaagattgtagaatgatcctttcaaattgtaatcttttctaacagagatattttaatatacttgctttcttaaaaaacaaaaaaactactgtcagtattaatactgagccagactggcatctacagatttcagatctatcattttattgattcttaagcttgtattaaaaactaggcaatatcatcatggatacataggagaagacacatttacaatcattcattgggccttttatctgtctatccatccatcatcatttgaaggcctaatatatgccaagtactcacatggtatgcattgagacataaaaaagactgtctataacctcaataagtattaaaaatcccattattacccataaggttcatcttatttcatttttagggaataaaattacatgtctatgaaatttcaattttaagcactattgtttttcatgaccataatttatttttaaaaataaattaaaggttaattatatgcatgtatgtatttctaataattaaaaatgtgttcaatccctgaaatgtctgccttttaaatataacacctactatttggttaattttgacgatttttttttttcaattaggaagctaaaaatactactttattccttatatgaacattcatccccctcctggcacctctaaacacacccaaataactcacaagtactgatttaacactctgtattactgaacttctttgaactattttgaactttgaatctcttctctgaataactgccgaaactcaaagataataattagttgatgaaggttatcaattaataaaataacacagaccagtcttaccaaactctaaatacattttaaaaaatgaataactttatttacaatttctatcatccaattactcactaggcattatttgtagtactttttttctctttgaaatctcataggatagtcacacttataaacattcccaatattcggattctagaagaaatgcaattcattaaaattttcctggcactgagagttaatctttagcagattgcatgaaaatactgaattcctggtaaggagatattttgttttaaaaataatgtgttttgatacgaatcagtgtattaactgataactaaaaagtactcttttttctatatatacatatttttttgaactcatattcacaatcaacatattcaatcagtgagttaagtctcattcctagctaccaaaattcctgggccacttttaaacactaaacatttcatttatcctctaagctaaaatggtgctgagttatttaaatctgaatgtaaaatgcattaaatcttagcttgtggtatataaacatttaattaatataaaactgcttgctataaactaagtaacatgtcatttggtgttaggtttttagtgaagttttagcttctcccaaatttttcaggaatgttatttgtaagacgtgtaacttttttgaagaactcttattttaaatgctcagacattggctttatgttcctctttgcattctcatattcttttattatacatctatactatgattgcaagattatataaaaatgccttgaataaatgatttcaagtgtcaaaa

SEQ ID NO: 107 - protein, 417 aa, Homo Sapiens
MRFAWTVLLLGPLQLCALVHCAPPAAGQQQPPREPPAAPGAWRQQIQWENNGQVFSLLSLGSQYQPQRRRDPGAAVPGAANASAQQPRTPILLIRDNRTAAGRTRTAGSSGVTAGRPRPTARHWFQAGYSTSRAREAGPSRAENQTAPGEVPALSNLRPPSRVDGMVGDDPYNPYKYSDDNPYYNYYDTYERPRPGGRYRPGYGTGYFQYGLPDLVADPYYIQASTYVQKMSMYNLRCAAEENCLASTAYRADVRDYDHRVLLRFPQRVKNQGTSDFLPSRPRYSWEWHSCHQHYHSMDEFSHLYLLDANTQRRWAEGHKASFCLEDTSCDYGYHRRFACTAHTQGLSPGCYDTYGADIDCQWIDITDVKPGNYILKVSVNPSYLVPESDYTNNVVRCDIRYTGHHAYASGCTISPY

SEQ ID NO: 108 - DNA, 1717 bp, Homo Sapiens
  CDS (85)...(1101)
gtggattcttgtccatagtgcatctgctttaagaattaacgaaagcagtgtcaagacagtaaggattcaaaccatttgccaaaaatgagtctaagtgcatttactctcttcctggcattgattggtggtaccagtggccagtactatgattatgattttcccctatcaatttatgggcaatcatcaccaaactgtgcaccagaatgtaactgccctgaaagctacccaagtgccatgtactgtgatgagctgaaattgaaaagtgtaccaatggtgcctcctggaatcaagtatctttaccttaggaataaccagattgaccatattgatgaaaaggcctttgagaatgtaactgatctgcagtggctcattctagatcacaaccttctagaaaactccaagataaaagggagagttttctctaaattgaaacaactgaagaagctgcatataaaccacaacaacctgacagagtctgtgggcccacttcccaaatctctggaggatctgcagcttactcataacaagatcacaaagctgggctcttttgaaggattggtaaacctgaccttcatccatctccagcacaatcggctgaaagaggatgctgtttcagctgcttttaaaggtcttaaatcactcgaataccttgacttgagcttcaatcagatagccagactgccttctggtctccctgtctctcttctaactctctacttagacaacaataagatcagcaacatccctgatgagtatttcaagcgttttaatgcattgcagtatctgcgtttatctcacaacgaactggctgatagtggaatacctggaaattctttcaatgtgtcatccctggttgagctggatctgtcctataacaagcttaaaaacataccaactgtcaatgaaaaccttgaaaactattacctggaggtcaatcaacttgagaagtttgacataaagagcttctgcaagatcctggggccattatcctactccaagatcaagcatttgcgtttggatggcaatcgcatctcagaaaccagtcttccaccggatatgtatgaatgtctacgtgttgctaacgaagtcactcttaattaatatctgtatcctggaacaatattttatggttatgtttttctgtgtgtcagttttcatagtatccatattttattactgtttattacttccatgaattttaaaatctgagggaaatgttttgtaaacatttattttttttaaagaaaagatgaaaggcaggcctatttcatcacaagaacacacacatatacacgaatagacatcaaactcaatgctttatttgtaaatttagtgtttttttatttctactgtcaaatgatgtgcaaaaccttttactggttgcatggaaatcagccaagttttataatccttaaatcttaatgttcctcaaagcttggattaaatacatatggatgttactctcttgcaccaaattatcttgatacattcaaatttgtctggtaaaaaaataggtggtagatattgaggccaagaatattgcaaaatacatgaagcttcatgcacttaaagaagtatttttagaataagaatttgcatacttacctagtgaaacttttctagaattatttttcactctaagtcatgtatgtttctctttgattatttgcatgttatgtttaataagctactagcaaaataaaacatagcaaatggc

SEQ ID NO: 109 - protein, 338 aa, Homo Sapiens
MSLSAFTLFLALIGGTSGQYYDYDFPLSIYGQSSPNCAPECNCPESYPSAMYCDELKLKSVPMVPPGIKYLYLRNNQIDHIDEKAFENVTDLQWLILDHNLLENSKIKGRVFSKLKQLKKLHINHNNLTESVGPLPKSLEDLQLTHNKITKLGSFEGLVNLTFIHLQHNRLKEDAVSAAFKGLKSLEYLDLSFNQIARLPSGLPVSLLTLYLDNNKISNIPDEYFKRFNALQYLRLSHNELADSGIPGNSFNVSSLVELDLSYNKLKNIPTVNENLENYYLEVNQLEKFDIKSFCKILGPLSYSKIKHLRLDGNRISETSLPPDMYECLRVANEVTLN

SEQ ID NO: 110 - DNA, 1081 bp, Homo Sapiens
  CDS (115)...(666)
attgcaacttggtctcacagtggcttaggccagggtgggagcagtgaacggagtcacaaaagaaatttttcagctgtcctctctgacaccaccccggcctgcctctttgttgccatgagagctgcctacctcttcctgctattcctgcctgcaggcttgctggctcagggccagtatgatctggacccgctgccgccgttccctgaccacgtccagtacacccactatagcgaccagatcgacaacccagactactatgattatcaagaggtgactcctcggccctccgaggaacagttccagttccagtcccagcagcaagtccaacaggaagtcatcccagccccaaccccagaaccaggaaatgcagagctggagcccacagagcctgggcctcttgactgccgtgaggaacagtacccgtgcacccgcctctactccatacacaggccttgcaaacagtgtctcaacgaggtctgcttctacagcctccgccgtgtgtacgtcattaacaaggagatctgtgttcgtacagtgtgtgcccacgaggagctcctccgagctgacctctgtcgggacaagttctccaaatgtggcgtgatggccagcagcggcctgtgccaatccgtggcggcctcctgtgccaggagctgtgggagctgctagggtggtgctggcatcctgagtcctggccctcctgggatctggggccctcgggctacctgacctggtgcttttttccccatccccatgttccttttattctgaaaaagttagtggactgcagccctgggggttgcaggctgcggtgcctcaggcccctccttcagcctgtggccacctctggggcacgatgggggctccccactgcccagtctgcccctcgggttgggggagtatcccaggcctctctgtgggacctgggcctgacgggcccttctcagcccgttttgaggacagacagtcccccgaggtaggctacatccccccaccccagctggtctgcttggatttcctacagcccccgtgggcatggaccacctttattttatacaaaattaaaaacaagtttttacaaaaa

SEQ ID NO: 111 - protein, 183 aa, Homo Sapiens
MRAAYLFLLFLPAGLLAQGQYDLDPLPPFPDHVQYTHYSDQIDNPDYYDYQEVTPRPSEEQFQFQSQQQVQQEVIPAPTPEPGNAELEPTEPGPLDCREEQYPCTRLYSIHRPCKQCLNEVCFYSLRRVYVINKEICVRTVCAHEELLRADLCRDKFSKCGVMASSGLCQSVAASCARSCGSC

SEQ ID NO: 112 - DNA, 1066 bp, Homo Sapiens
  CDS (100)...(651)
ggccaaggggcggctccggcgggcggactcggagcgggcggcggagtgacccggacagctgtcctctctgacaccaccccggcctgcctctttgttgccatgagagctgcctacctcttcctgctattcctgcctgcaggcttgctggctcagggccagtatgatctggacccgctgccgccgttccctgaccacgtccagtacacccactatagcgaccagatcgacaacccagactactatgattatcaagaggtgactcctcggccctccgaggaacagttccagttccagtcccagcagcaagtccaacaggaagtcatcccagccccaaccccagaaccaggaaatgcagagctggagcccacagagcctgggcctcttgactgccgtgaggaacagtacccgtgcacccgcctctactccatacacaggccttgcaaacagtgtctcaacgaggtctgcttctacagcctccgccgtgtgtacgtcattaacaaggagatctgtgttcgtacagtgtgtgcccacgaggagctcctccgagctgacctctgtcgggacaagttctccaaatgtggcgtgatggccagcagcggcctgtgccaatccgtggcggcctcctgtgccaggagctgtgggagctgctagggtggtgctggcatcctgagtcctggccctcctgggatctggggccctcgggctacctgacctggtgcttttttccccatccccatgttccttttattctgaaaaagttagtggactgcagccctgggggttgcaggctgcggtgcctcaggcccctccttcagcctgtggccacctctggggcacgatgggggctccccactgcccagtctgcccctcgggttgggggagtatcccaggcctctctgtgggacctgggcctgacgggcccttctcagcccgttttgaggacagacagtcccccgaggtaggctacatccccccaccccagctggtctgcttggatttcctacagcccccgtgggcatggaccacctttattttatacaaaattaaaaacaagtttttacaaaaa

SEQ ID NO: 113 - protein, 183 aa, Homo Sapiens; identical to SEQ ID NO: 111

SEQ ID NO: 114 - DNA, 1611 bp, Homo Sapiens
  CDS (328)...(1410)
acataatttctggagccctgtaccaacgtgtggccacatattctgtcaggaaccctgtgtgatcatggtctggatctgcaacacgggccaggccaaagtcacagatcttgagatcacaggtggtgttgagcagcaggcaggcaggcaatcggtccgagtggctgtcggctcttcagctctccgctcggcgtcttccttcctctcccggtcagcgtcggcggctgcaccggcggcgggcagtcctgcgggaggggcgacaagagctgaggcgcggccgccgagcgtcgagctcagcgcggcggaggcggcggcggcccggcagccaacatggcggcggcggcggcggcgggcgcgggcccggagatggtccgcgggcaggtgttcgacgtggggccgcgctacaccaacctctcgtacatcggcgagggcgcctacggcatggtgtgctctgcttatgataatgtcaacaaagttcgagtagctatcaagaaaatcagcccctttgagcaccagacctactgccagagaaccctgagggagataaaaatcttactgcgcttcagacatgagaacatcattggaatcaatgacattattcgagcaccaaccatcgagcaaatgaaagatgtatatatagtacaggacctcatggaaacagatctttacaagctcttgaagacacaacacctcagcaatgaccatatctgctattttctctaccagatcctcagagggttaaaatatatccattcagctaacgttctgcaccgtgacctcaagccttccaacctgctgctcaacaccacctgtgatctcaagatctgtgactttggcctggcccgtgttgcagatccagaccatgatcacacagggttcctgacagaatatgtggccacacgttggtacagggctccagaaattatgttgaattccaagggctacaccaagtccattgatatttggtctgtaggctgcattctggcagaaatgctttccaacaggcccatctttccagggaagcattatcttgaccagctgaatcacattttgggtattcttggatccccatcacaagaagacctgaattgtataataaatttaaaagctaggaactatttgctttctcttccacacaaaaataaggtgccatggaacaggctgttcccaaatgctgactccaaagctctggacttattggacaaaatgttgacattcaacccacacaagaggattgaagtagaacaggctctggcccacccatatctggagcagtattacgacccgagtgacgagcccatcgccgaagcaccattcaagttcgacatggaattggatgacttgcctaaggaaaagctaaaagaactaatttttgaagagactgctagattccagccaggatacagatcttaaatttgtcaggacaagggctcagaggactggacgtgctcagacatcggtgttcttcttcccagttcttgacccctggtcctgtctccagcccgtcttggcttatccactttgactcctttgagccgtttggaggggcggtttctggtagttgtggcttttatgctttcaaagaatttcttcagtccagagaattcactggcc

SEQ ID NO: 115 - protein, 360 aa, Homo Sapiens [sequence omitted]

SEQ ID NO: 116 - DNA, 786 bp, Homo Sapiens
  CDS (26)...(457)
cgggcgaagcagcgcgggcagcgagatgcagcaccgaggcttcctcctcctcaccctcctcgccctgctggcgctcacctccgcggtcgccaaaaagaaagataaggtgaagaagggcggcccggggagcgagtgcgctgagtgggcctgggggccctgcacccccagcagcaaggattgcggcgtgggtttccgcgagggcacctgcggggcccagacccagcgcatccggtgcagggtgccctgcaactggaagaaggagtttggagccgactgcaagtacaagtttgagaactggggtgcgtgtgatgggggcacaggcaccaaagtccgccaaggcaccctgaagaaggcgcgctacaatgctcagtgccaggagaccatccgcgtcaccaagccctgcacccccaagaccaaagcaaaggccaaagccaagaaagggaagggaaaggactagacgccaagcctggatgccaaggagcccctggtgtcacatggggcctggccacgccctccctctcccaggcccgagatgtgacccaccagtgccttctgtctgctcgttagctttaatcaatcatgccctgccttgtccctctcactccccagccccacccctaagtgcccaaagtggggagggacaagggattctgggaagcttgagcctcccccaaagcaatgtgagtcccagagcccgcttttgttcttccccacaattccattactaagaaacacatcaaataaactgactttttccccccaataaaagctcttcttttttaatat

SEQ ID NO: 117 - protein, 143 aa, Homo Sapiens
MQHRGFLLLTLLALLALTSAVAKKKDKVKKGGPGSECAEWAWGPCTPSSKDCGVGFREGTCGAQTQRIRCRVPCNWKKEFGADCKYKFENWGACDGGTGTKVRQGTLKKARYNAQCQETIRVTKPCTPKTKAKAKAKKGKGKD

SEQ ID NO: 118 - DNA, 1973 bp, Homo Sapiens
  CDS (72)...(1481)
gggatattggagtagcaagaggctgggaagccatcacttaccttgcactgagaaagaagacaaaggccagtatgcacagctttcctccactgctgctgctgctgttctggggtgtggtgtctcacagcttcccagcgactctagaaacacaagagcaagatgtggacttagtccagaaatacctggaaaaatactacaacctgaagaatgatgggaggcaagttgaaaagcggagaaatagtggcccagtggttgaaaaattgaagcaaatgcaggaattctttgggctgaaagtgactgggaaaccagatgctgaaaccctgaaggtgatgaagcagcccagatgtggagtgcctgatgtggctcagtttgtcctcactgaggggaaccctcgctgggagcaaacacatctgacctacaggattgaaaattacacgccagatttgccaagagcagatgtggaccatgccattgagaaagccttccaactctggagtaatgtcacacctctgacattcaccaaggtctctgagggtcaagcagacatcatgatatcttttgtcaggggagatcatcgggacaactctccttttgatggacctggaggaaatcttgctcatgcttttcaaccaggcccaggtattggaggggatgctcattttgatgaagatgaaaggtggaccaacaatttcagagagtacaacttacatcgtgttgcggctcatgaactcggccattctcttggactctcccattctactgatatcggggctttgatgtaccctagctacaccttcagtggtgatgttcagctagctcaggatgacattgatggcatccaagccatatatggacgttcccaaaatcctgtccagcccatcggcccacaaaccccaaaagcgtgtgacagtaagctaacctttgatgctataactacgattcggggagaagtgatgttctttaaagacagattctacatgcgcacaaatcccttctacccggaagttgagctcaatttcatttctgttttctggccacaactgccaaatgggcttgaagctgcttacgaatttgccgacagagatgaagtccggtttttcaaagggaataagtactgggctgttcagggacagaatgtgctacacggataccccaaggacatctacagctcctttggcttccctagaactgtgaagcatatcgatgctgctctttctgaggaaaacactggaaaaacctacttctttgttgctaacaaatactggaggtatgatgaatataaacgatctatggatccaggttatcccaaaatgatagcacatgactttcctggaattggccacaaagttgatgcagttttcatgaaagatggatttttctatttctttcatggaacaagacaatacaaatttgatcctaaaacgaagagaattttgactctccagaaagctaatagctggttcaactgcaggaaaaattgaacattactaatttgaatggaaaacacatggtgtgagtccaaagaaggtgttttcctgaagaactgtctattttctcagtcatttttaacctctagagtcactgatacacagaatataatcttatttatacctcagtttgcatatttttttactatttagaatgtagccctttttgtactgatataatttagttccacaaatggtgggtacaaaaagtcaagtttgtggcttatggattcatataggccagagttgcaaagatcttttccagagtatgcaactctgacgttgatcccagagagcagcttcagtgacaaacatatcctttcaagacagaaagagacaggagacatgagtctttgccggaggaaaagcagctcaagaacacatgtgcagtcactggtgtcaccctggataggcaagggataactcttctaacacaaaataagtgttttatgtttggaataaagtcaaccttgtttctactgtttt

SEQ ID NO: 119 - protein, 469 aa, Homo Sapiens
MHSFPPLLLLLFWGVVSHSFPATLETQEQDVDLVQKYLEKYYNLKNDGRQVEKRRNSGPVVEKLKQMQEFFGLKVTGKPDAETLKVMKQPRCGVPDVAQFVLTEGNPRWEQTHLTYRIENYTPDLPRADVDHAIEKAFQLWSNVTPLTFTKVSEGQADIMISFVRGDHRDNSPFDGPGGNLAHAFQPGPGIGGDAHFDEDERWTNNFREYNLHRVAAHELGHSLGLSHSTDIGALMYPSYTFSGDVQLAQDDIDGIQAIYGRSQNPVQPIGPQTPKACDSKLTFDAITTIRGEVMFFKDRFYMRTNPFYPEVELNFISVFWPQLPNGLEAAYEFADRDEVRFFKGNKYWAVQGQNVLHGYPKDIYSSFGFPRTVKHIDAALSEENTGKTYFFVANKYWRYDEYKRSMDPGYPKMIAHDFPGIGHKVDAVFMKDGFFYFFHGTRQYKFDPKTKRILTLQKANSWFNCRKN

SEQ ID NO: 120 - DNA, 2260 bp, Homo Sapiens
  CDS (23)...(1489)
aagcccagcagccccggggcggatggctccggccgcctggctccgcagcgcggccgcgcgcgccctcctgcccccgatgctgctgctgctgctccagccgccgccgctgctggcccgggctctgccgccggacgtccaccacctccatgccgagaggagggggccacagccctggcatgcagccctgcccagtagcccggcacctgcccctgccacgcaggaagccccccggcctgccagcagcctcaggcctccccgctgtggcgtgcccgacccatctgatgggctgagtgcccgcaaccgacagaagaggttcgtgctttctggcgggcgctgggagaagacggacctcacctacaggatccttcggttcccatggcagttggtgcaggagcaggtgcggcagacgatggcagaggccctaaaggtatggagcgatgtgacgccactcacctttactgaggtgcacgagggccgtgctgacatcatgatcgacttcgccaggtactggcatggggacgacctgccgtttgatgggcctgggggcatcctggcccatgccttcttccccaagactcaccgagaaggggatgtccacttcgactatgatgagacctggactatcggggatgaccagggcacagacctgctgcaggtggcagcccatgaatttggccacgtgctggggctgcagcacacaacagcagccaaggccctgatgtccgccttctacacctttcgctacccactgagtctcagcccagatgactgcaggggcgttcaacacctatatggccagccctggcccactgtcacctccaggaccccagccctgggcccccaggctgggatagacaccaatgagattgcaccgctggagccagacgccccgccagatgcctgtgaggcctcctttgacgcggtctccaccatccgaggcgagctctttttcttcaaagcgggctttgtgtggcgcctccgtgggggccagctgcagcccggctacccagcattggcctctcgccactggcagggactgcccagccctgtggacgctgccttcgaggatgcccagggccacatttggttcttccaaggtgctcagtactgggtgtacgacggtgaaaagccagtcctgggccccgcacccctcaccgagctgggcctggtgaggttcccggtccatgctgccttggtctggggtcccgagaagaacaagatctacttcttccgaggcagggactactggcgtttccaccccagcacccggcgtgtagacagtcccgtgccccgcagggccactgactggagaggggtgccctctgagatcgacgctgccttccaggatgctgatggctatgcctacttcctgcgcggccgcctctactggaagtttgaccctgtgaaggtgaaggctctggaaggcttcccccgtctcgtgggtcctgacttctttggctgtgccgagcctgccaacactttcctctgaccatggcttggatgccctcaggggtgctgacccctgccaggccacgaatatcaggctagagacccatggccatctttgtggctgtgggcaccaggcatgggactgagcccatgtctcctgcagggggatggggtggggtacaaccaccatgacaactgccgggagggccacgcaggtcgtggtcacctgccagcgactgtctcagactgggcagggaggctttggcatgacttaagaggaagggcagtcttgggacccgctatgcaggtcctggcaaacctggctgccctgtctcatccctgtccctcagggtagcaccatggcaggactgggggaactggagtgtccttgctgtatccctgttgtgaggttccttccaggggctggcactgaagcaagggtgctggggccccatggccttcagccctggctgagcaactgggctgtagggcagggccacttcctgaggtcaggtcttggtaggtgcctgcatctgtctgccttctggctgacaatcctggaaatctgttctccagaatccaggccaaaaagttcacagtcaaatggggaggggtattcttcatgcaggagaccccaggccctggaggctgcaacatacctcaatcctgtcccaggccggatcctcctgaagcccttttcgcagcactgctatcctccaaagccattgtaaatgtgtgtacagtgtgtataaaccttcttcttcttttttttttttaaactgaggattgtcattaaacacagttgttttct

SEQ ID NO: 121 - protein, 488 aa, Homo Sapiens
MAPAAWLRSAAARALLPPMLLLLLQPPPLLARALPPDVHHLHAERRGPQPWHAALPSSPAPAPATQEAPRPASSLRPPRCGVPDPSDGLSARNRQKRFVLSGGRWEKTDLTYRILRFPWQLVQEQVRQTMAEALKVWSDVTPLTFTEVHEGRADIMIDFARYWHGDDLPFDGPGGILAHAFFPKTHREGDVHFDYDETWTIGDDQGTDLLQVAAHEFGHVLGLQHTTAAKALMSAFYTFRYPLSLSPDDCRGVQHLYGQPWPTVTSRTPALGPQAGIDTNEIAPLEPDAPPDACEASFDAVSTIRGELFFFKAGFVWRLRGGQLQPGYPALASRHWQGLPSPVDAAFEDAQGHIWFFQGAQYWVYDGEKPVLGPAPLTELGLVRFPVHAALVWGPEKNKIYFFRGRDYWRFHPSTRRVDSPVPRRATDWRGVPSEIDAAFQDADGYAYFLRGRLYWKFDPVKVKALEGFPRLVGPDFFGCAEPANTFL

SEQ ID NO: 122 - DNA, 1778 bp, Homo Sapiens
  CDS (13)...(1425)
tagaagtttacaatgaagtttcttctaatactgctcctgcaggccactgcttctggagctcttcccctgaacagctctacaagcctggaaaaaaataatgtgctatttggtgagagatacttagaaaaattttatggccttgagataaacaaacttccagtgacaaaaatgaaatatagtggaaacttaatgaaggaaaaaatccaagaaatgcagcacttcttgggtctgaaagtgaccgggcaactggacacatctaccctggagatgatgcacgcacctcgatgtggagtccccgatctccatcatttcagggaaatgccaggggggcccgtatggaggaaacattatatcacctacagaatcaataattacacacctgacatgaaccgtgaggatgttgactacgcaatccggaaagctttccaagtatggagtaatgttacccccttgaaattcagcaagattaacacaggcatggctgacattttggtggtttttgcccgtggagctcatggagacttccatgcttttgatggcaaaggtggaatcctagcccatgcttttggacctggatctggcattggaggggatgcacatttcgatgaggacgaattctggactacacattcaggaggcacaaacttgttcctcactgctgttcacgagattggccattccttaggtcttggccattctagtgatccaaaggctgtaatgttccccacctacaaatatgtcgacatcaacacatttcgcctctctgctgatgacatacgtggcattcagtccctgtatggagacccaaaagagaaccaacgcttgccaaatcctgacaattcagaaccagctctctgtgaccccaatttgagttttgatgctgtcactaccgtgggaaataagatctttttcttcaaagacaggttcttctggctgaaggtttctgagagaccaaagaccagtgttaatttaatttcttccttatggccaaccttgccatctggcattgaagctgcttatgaaattgaagccagaaatcaagtttttctttttaaagatgacaaatactggttaattagcaatttaagaccagagccaaattatcccaagagcatacattcttttggttttcctaactttgtgaaaaaaattgatgcagctgtttttaacccacgtttttataggacctacttctttgtagataaccagtattggaggtatgatgaaaggagacagatgatggaccctggttatcccaaactgattaccaagaacttccaaggaatcgggcctaaaattgatgcagtcttctattctaaaaacaaatactactatttcttccaaggatctaaccaatttgaatatgacttcctactccaacgtatcaccaaaacactgaaaagcaatagctggtttggttgttagaaatggtgtaattaatggtttttgttagttcacttcagcttaataagtatttattgcatatttgctatgtcctcagtgtaccactacttagagatatgtatcataaaaataaaatctgtaaaccataggtaatgattatataaaatacataatatttttcaattttgaaaactctaattgtccattcttgcttgactctactattaagtttgaaaatagttaccttcaaagcaagataattctatttgaagcatgctctgtaagttgcttcctaacatccttggactgagaaattatacttacttctggcataactaaaattaagtatatatattttggctcaaataaaattg

SEQ ID NO: 123 - protein, 470 aa, Homo Sapiens
MKFLLILLLQATASGALPLNSSTSLEKNNVLFGERYLEKFYGLEINKLPVTKMKYSGNLMKEKIQEMQHFLGLKVTGQLDTSTLEMMHAPRCGVPDLHHFREMPGGPVWRKHYITYRINNYTPDMNREDVDYAIRKAFQVWSNVTPLKFSKINTGMADILVVFARGAHGDFHAFDGKGGILAHAFGPGSGIGGDAHFDEDEFWTTHSGGTNLFLTAVHEIGHSLGLGHSSDPKAVMFPTYKYVDINTFRLSADDIRGIQSLYGDPKENQRLPNPDNSEPALCDPNLSFDAVTTVGNKIFFFKDRFFWLKVSERPKTSVNLISSLWPTLPSGIEAAYEIEARNQVFLFKDDKYWLISNLRPEPNYPKSIHSFGFPNFVKKIDAAVFNPRFYRTYFFVDNQYWRYDERRQMMDPGYPKLITKNFQGIGPKIDAVFYSKNKYYYFFQGSNQFEYDFLLQRITKTLKSNSWFGC

SEQ ID NO: 124 - DNA, 3069 bp, Homo Sapiens
  CDS (290)...(2272)
tgtttccgctgcatccagacttcctcaggcggtggctggaggctgcgcatctggggctttaaacatacaaagggattgccaggacctgcggcggcggcggcggcggcgggggctggggcgcgggggccggaccatgagccgctgagccgggcaaaccccaggccaccgagccagcggaccctcggagcgcagccctgcgccgcggaccaggctccaaccaggcggcgaggcggccacacgcaccgagccagcgacccccgggcgacgcgcggggccagggagcgctacgatggaggcgctaatggcccggggcgcgctcacgggtcccctgagggcgctctgtctcctgggctgcctgctgagccacgccgccgccgcgccgtcgcccatcatcaagttccccggcgatgtcgcccccaaaacggacaaagagttggcagtgcaatacctgaacaccttctatggctgccccaaggagagctgcaacctgtttgtgctgaaggacacactaaagaagatgcagaagttctttggactgccccagacaggtgatcttgaccagaataccatcgagaccatgcggaagccacgctgcggcaacccagatgtggccaactacaacttcttccctcgcaagcccaagtgggacaagaaccagatcacatacaggatcattggctacacacctgatctggacccagagacagtggatgatgcctttgctcgtgccttccaagtctggagcgatgtgaccccactgcggttttctcgaatccatgatggagaggcagacatcatgatcaactttggccgctgggagcatggcgatggatacccctttgacggtaaggacggactcctggctcatgccttcgccccaggcactggtgttgggggagactcccattttgatgacgatgagctatggaccttgggagaaggccaagtggtccgtgtgaagtatggcaacgccgatggggagtactgcaagttccccttcttgttcaatggcaaggagtacaacagctgcactgatactggccgcagcgatggcttcctctggtgctccaccacctacaactttgagaaggatggcaagtacggcttctgtccccatgaagccctgttcaccatgggcggcaacgctgaaggacagccctgcaagtttccattccgcttccagggcacatcctatgacagctgcaccactgagggccgcacggatggctaccgctggtgcggcaccactgaggactacgaccgcgacaagaagtatggcttctgccctgagaccgccatgtccactgttggtgggaactcagaaggtgccccctgtgtcttccccttcactttcctgggcaacaaatatgagagctgcaccagcgccggccgcagtgacggaaagatgtggtgtgcgaccacagccaactacgatgacgaccgcaagtggggcttctgccctgaccaagggtacagcctgttcctcgtggcagcccacgagtttggccacgccatggggctggagcactcccaagaccctggggccctgatggcacccatttacacctacaccaagaacttccgtctgtcccaggatgacatcaagggcattcaggagctctatggggcctctcctgacattgaccttggcaccggccccacccccacactgggccctgtcactcctgagatctgcaaacaggacattgtatttgatggcatcgctcagatccgtggtgagatcttcttcttcaaggaccggttcatttggcggactgtgacgccacgtgacaagcccatggggcccctgctggtggccacattctggcctgagctcccggaaaagattgatgcggtatacgaggccccacaggaggagaaggctgtgttctttgcagggaatgaatactggatctactcagccagcaccctggagcgagggtaccccaagccactgaccagcctgggactgccccctgatgtccagcgagtggatgccgcctttaactggagcaaaaacaagaagacatacatctttgctggagacaaattctggagatacaatgaggtgaagaagaaaatggatcctggctttcccaagctcatcgcagatgcctggaatgccatccccgataacctggatgccgtcgtggacctgcagggcggcggtcacagctacttcttcaagggtgcctattacctgaagctggagaaccaaagtctgaagagcgtgaagtttggaagcatcaaatccgactggctaggctgctgagctggccctggctcccacaggcccttcctctccactgccttcgatacaccgggcctggagaactagagaaggacccggaggggcctggcagccgtgccttcagctctacagctaatcagcattctcactcctacctggtaatttaagattccagagagtggctcctcccggtgcccaagaatagatgctgactgtactcctcccaggcgccccttccccctccaatcccaccaaccctcagagccacccctaaagagatcctttgatattttcaacgcagccctgctttgggctgccctggtgctgccacacttcaggctcttctcctttcacaaccttctgtggctcacagaacccttggagccaatggagactgtctcaagagggcactggtggcccgacagcctggcacagggcagtgggacagggcatggccaggtggccactccagacccctggcttttcactgctggctgccttagaacctttcttacattagcagtttgctttgtatgcactttgtttttttctttgggtcttgttttttttttccacttagaaattgcatttcctgacagaaggactcaggttgtctgaagtcactgcacagtgcatctcagcccacatagtgatggttcccctgttcactctacttagcatgtccctaccgagtctcttctccactggatggaggaaaaccaagccgtggcttcccgctcagccctccctgcccctcccttcaaccattccccatgggaaatgtcaacaagtatgaataaagacacctactgagtggc

SEQ ID NO: 125 - protein, 660 aa, Homo Sapiens
MEALMARGALTGPLRALCLLGCLLSHAAAAPSPIIKFPGDVAPKTDKELAVQYLNTFYGCPKESCNLFVLKDTLKKMQKFFGLPQTGDLDQNTIETMRKPRCGNPDVANYNFFPRKPKWDKNQITYRIIGYTPDLDPETVDDAFARAFQVWSDVTPLRFSRIHDGEADIMINFGRWEHGDGYPFDGKDGLLAHAFAPGTGVGGDSHFDDDELWTLGEGQVVRVKYGNADGEYCKFPFLFNGKEYNSCTDTGRSDGFLWCSTTYNFEKDGKYGFCPHEALFTMGGNAEGQPCKFPFRFQGTSYDSCTTEGRTDGYRWCGTTEDYDRDKKYGFCPETAMSTVGGNSEGAPCVFPFTFLGNKYESCTSAGRSDGKMWCATTANYDDDRKWGFCPDQGYSLFLVAAHEFGHAMGLEHSQDPGALMAPIYTYTKNFRLSQDDIKGIQELYGASPDIDLGTGPTPTLGPVTPEICKQDIVFDGIAQIRGEIFFFKDRFIWRTVTPRDKPMGPLLVATFWPELPEKIDAVYEAPQEEKAVFFAGNEYWIYSASTLERGYPKPLTSLGLPPDVQRVDAAFNWSKNKKTYIFAGDKFWRYNEVKKKMDPGFPKLIADAWNAIPDNLDAVVDLQGGGHSYFFKGAYYLKLENQSLKSVKFGSIKSDWLGC

SEQ ID NO: 126 - DNA, 1821 bp, Homo Sapiens
  CDS (64)...(1497)
acaaggaggcaggcaagacagcaaggcatagagacaacatagagctaagtaaagccagtggaaatgaagagtcttccaatcctactgttgctgtgcgtggcagtttgctcagcctatccattggatggagctgcaaggggtgaggacaccagcatgaaccttgttcagaaatatctagaaaactactacgacctcaaaaaagatgtgaaacagtttgttaggagaaaggacagtggtcctgttgttaaaaaaatccgagaaatgcagaagttccttggattggaggtgacggggaagctggactccgacactctggaggtgatgcgcaagcccaggtgtggagttcctgatgttggtcacttcagaacctttcctggcatcccgaagtggaggaaaacccaccttacatacaggattgtgaattatacaccagatttgccaaaagatgctgttgattctgctgttgagaaagctctgaaagtctgggaagaggtgactccactcacattctccaggctgtatgaaggagaggctgatataatgatctcttttgcagttagagaacatggagacttttacccttttgatggacctggaaatgttttggcccatgcctatgcccctgggccagggattaatggagatgcccactttgatgatgatgaacaatggacaaaggatacaacagggaccaatttatttctcgttgctgctcatgaaattggccactccctgggtctctttcactcagccaacactgaagctttgatgtacccactctatcactcactcacagacctgactcggttccgcctgtctcaagatgatataaatggcattcagtccctctatggacctccccctgactcccctgagacccccctggtacccacggaacctgtccctccagaacctgggacgccagccaactgtgatcctgctttgtcctttgatgctgtcagcactctgaggggagaaatcctgatctttaaagacaggcacttttggcgcaaatccctcaggaagcttgaacctgaattgcatttgatctcttcattttggccatctcttccttcaggcgtggatgccgcatatgaagttactagcaaggacctcgttttcatttttaaaggaaatcaattctgggccatcagaggaaatgaggtacgagctggatacccaagaggcatccacaccctaggtttccctccaaccgtgaggaaaatcgatgcagccatttctgataaggaaaagaacaaaacatatttctttgtagaggacaaatactggagatttgatgagaagagaaattccatggagccaggctttcccaagcaaatagctgaagactttccagggattgactcaaagattgatgctgtttttgaagaatttgggttcttttatttctttactggatcttcacagttggagtttgacccaaatgcaaagaaagtgacacacactttgaagagtaacagctggcttaattgttgaaagagatatgtagaaggcacaatatgggcactttaaatgaagctaataattcttcacctaagtctctgtgaattgaaatgttcgttttctcctgcctgtgctgtgactcgagtcacactcaagggaacttgagcgtgaatctgtatcttgccggtcatttttatgttattacagggcattcaaatgggctgctgcttagcttgcaccttgtcacatagagtgatctttcccaagagaaggggaagcactcgtgtgcaacagacaagtgactgtatctgtgtagactatttgcttatttaataaagacgatttgtcagttgtttt

SEQ ID NO: 127 - protein, 477 aa, Homo Sapiens
MKSLPILLLLCVAVCSAYPLDGAARGEDTSMNLVQKYLENYYDLKKDVKQFVRRKDSGPVVKKIREMQKFLGLEVTGKLDSDTLEVMRKPRCGVPDVGHFRTFPGIPKWRKTHLTYRIVNYTPDLPKDAVDSAVEKALKVWEEVTPLTFSRLYEGEADIMISFAVREHGDFYPFDGPGNVLAHAYAPGPGINGDAHFDDDEQWTKDTTGTNLFLVAAHEIGHSLGLFHSANTEALMYPLYHSLTDLTRFRLSQDDINGIQSLYGPPPDSPETPLVPTEPVPPEPGTPANCDPALSFDAVSTLRGEILIFKDRHFWRKSLRKLEPELHLISSFWPSLPSGVDAAYEVTSKDLVFIFKGNQFWAIRGNEVRAGYPRGIHTLGFPPTVRKIDAAISDKEKNKTYFFVEDKYWRFDEKRNSMEPGFPKQIAEDFPGIDSKIDAVFEEFGFFYFFTGSSQLEFDPNAKKVTHTLKSNSWLNC

SEQ ID NO: 128 - DNA, 1127 bp, Homo Sapiens
  CDS (48)...(851)
accaaatcaaccataggtccaagaacaattgtctctggacggcagctatgcgactcaccgtgctgtgtgctgtgtgcctgctgcctggcagcctggccctgccgctgcctcaggaggcgggaggcatgagtgagctacagtgggaacaggctcaggactatctcaagagattttatctctatgactcagaaacaaaaaatgccaacagtttagaagccaaactcaaggagatgcaaaaattctttggcctacctataactggaatgttaaactcccgcgtcatagaaataatgcagaagcccagatgtggagtgccagatgttgcagaatactcactatttccaaatagcccaaaatggacttccaaagtggtcacctacaggatcgtatcatatactcgagacttaccgcatattacagtggatcgattagtgtcaaaggctttaaacatgtggggcaaagagatccccctgcatttcaggaaagttgtatggggaactgctgacatcatgattggctttgcgcgaggagctcatggggactcctacccatttgatgggccaggaaacacgctggctcatgcctttgcgcctgggacaggtctcggaggagatgctcacttcgatgaggatgaacgctggacggatggtagcagtctagggattaacttcctgtatgctgcaactcatgaacttggccattctttgggtatgggacattcctctgatcctaatgcagtgatgtatccaacctatggaaatggagatccccaaaattttaaactttcccaggatgatattaaaggcattcagaaactatatggaaagagaagtaattcaagaaagaaatagaaacttcaggcagaacatccattcattcattcattggattgtatatcattgttgcacaatcagaattgataagcactgttcctccactccatttagcaattatgtcacccttttttattgcagttggtttttgaatgtctttcactccttttattggttaaactcctttatggtgtgactgtgtcttattccatctatgagctttgtcagtgcgcgtagatgtcaataaatgttacatacacaaataaataaaatgtttattccatggtaaattta

SEQ ID NO: 129 - protein, 267 aa, Homo Sapiens
MRLTVLCAVCLLPGSLALPLPQEAGGMSELQWEQAQDYLKRFYLYDSETKNANSLEAKLKEMQKFFGLPITGMLNSRVIEIMQKPRCGVPDVAEYSLFPNSPKWTSKVVTYRIVSYTRDLPHITVDRLVSKALNMWGKEIPLHFRKVVWGTADIMIGFARGAHGDSYPFDGPGNTLAHAFAPGTGLGGDAHFDEDERWTDGSSLGINFLYAATHELGHSLGMGHSSDPNAVMYPTYGNGDPQNFKLSQDDIKGIQKLYGKRSNSRKK

SEQ ID NO: 130 - DNA, 1078 bp, Homo Sapiens
  CDS (28)...(831)
aagaacaattgtctctggacggcagctatgcgactcaccgtgctgtgtgctgtgtgcctgctgcctggcagcctggccctgccgctgcctcaggaggcgggaggcatgagtgagctacagtgggaacaggctcaggactatctcaagagattttatctctatgactcagaaacaaaaaatgccaacagtttagaagccaaactcaaggagatgcaaaaattctttggcctacctataactggaatgttaaactcccgcgtcatagaaataatgcagaagcccagatgtggagtgccagatgttgcagaatactcactatttccaaatagcccaaaatggacttccaaagtggtcacctacaggatcgtatcatatactcgagacttaccgcatattacagtggatcgattagtgtcaaaggctttaaacatgtggggcaaagagatccccctgcatttcaggaaagttgtatggggaactgctgacatcatgattggctttgcgcgaggagctcatggggactcctacccatttgatgggccaggaaacacgctggctcatgcctttgcgcctgggacaggtctcggaggagatgctcacttcgatgaggatgaacgctggacggatggtagcagtctagggattaacttcctgtatgctgcaactcatgaacttggccattctttgggtatgggacattcctctgatcctaatgcagtgatgtatccaacctatggaaatggagatccccaaaattttaaactttcccaggatgatattaaaggcattcagaaactatatggaaagagaagtaattcaagaaagaaatagaaacttcaggcagaacatccattcattcattcattggattgtatatcattgttgcacaatcagaattgataagcactgttcctccactccatttagcaattatgtcacccttttttattgcagttggtttttgaatgtctttcactccttttattggttaaactcctttatggtgtgactgtgtcttattccatctatgagctttgtcagtgcgcgtagatgtcaataaatgttacatacacaaata

SEQ ID NO: 131 - DNA, 2334 bp, Homo Sapiens
  CDS (20)...(2143)
agacacctctgccctcaccatgagcctctggcagcccctggtcctggtgctcctggtgctgggctgctgctttgctgcccccagacagcgccagtccacccttgtgctcttccctggagacctgagaaccaatctcaccgacaggcagctggcagaggaatacctgtaccgctatggttacactcgggtggcagagatgcgtggagagtcgaaatctctggggcctgcgctgctgcttctccagaagcaactgtccctgcccgagaccggtgagctggatagcgccacgctgaaggccatgcgaaccccacggtgcggggtcccagacctgggcagattccaaacctttgagggcgacctcaagtggcaccaccacaacatcacctattggatccaaaactactcggaagacttgccgcgggcggtgattgacgacgcctttgcccgcgccttcgcactgtggagcgcggtgacgccgctcaccttcactcgcgtgtacagccgggacgcagacatcgtcatccagtttggtgtcgcggagcacggagacgggtatcccttcgacgggaaggacgggctcctggcacacgcctttcctcctggccccggcattcagggagacgcccatttcgacgatgacgagttgtggtccctgggcaagggcgtcgtggttccaactcggtttggaaacgcagatggcgcggcctgccacttccccttcatcttcgagggccgctcctactctgcctgcaccaccgacggtcgctccgacggcttgccctggtgcagtaccacggccaactacgacaccgacgaccggtttggcttctgccccagcgagagactctacacccgggacggcaatgctgatgggaaaccctgccagtttccattcatcttccaaggccaatcctactccgcctgcaccacggacggtcgctccgacggctaccgctggtgcgccaccaccgccaactacgaccgggacaagctcttcggcttctgcccgacccgagctgactcgacggtgatggggggcaactcggcgggggagctgtgcgtcttccccttcactttcctgggtaaggagtactcgacctgtaccagcgagggccgcggagatgggcgcctctggtgcgctaccacctcgaactttgacagcgacaagaagtggggcttctgcccggaccaaggatacagtttgttcctcgtggcggcgcatgagttcggccacgcgctgggcttagatcattcctcagtgccggaggcgctcatgtaccctatgtaccgcttcactgaggggccccccttgcataaggacgacgtgaatggcatccggcacctctatggtcctcgccctgaacctgagccacggcctccaaccaccaccacaccgcagcccacggctcccccgacggtctgccccaccggaccccccactgtccacccctcagagcgccccacagctggccccacaggtcccccctcagctggccccacaggtccccccactgctggcccttctacggccactactgtgcctttgagtccggtggacgatgcctgcaacgtgaacatcttcgacgccatcgcggagattgggaaccagctgtatttgttcaaggatgggaagtactggcgattctctgagggcagggggagccggccgcagggccccttccttatcgccgacaagtggcccgcgctgccccgcaagctggactcggtctttgaggagccgctctccaagaagcttttcttcttctctgggcgccaggtgtgggtgtacacaggcgcgtcggtgctgggcccgaggcgtctggacaagctgggcctgggagccgacgtggcccaggtgaccggggccctccggagtggcagggggaagatgctgctgttcagcgggcggcgcctctggaggttcgacgtgaaggcgcagatggtggatccccggagcgccagcgaggtggaccggatgttccccggggtgcctttggacacgcacgacgtcttccagtaccgagagaaagcctatttctgccaggaccgcttctactggcgcgtgagttcccggagtgagttgaaccaggtggaccaagtgggctacgtgacctatgacatcctgcagtgccctgaggactagggctcccgtcctgctttgcagtgccatgtaaatccccactgggaccaaccctggggaaggagccagtttgccggatacaaactggtattctgttctggaggaaagggaggagtggaggtgggctgggccctctcttctcacctttgttttttgttggagtgtttctaataaacttggattctctaaccttt

SEQ ID NO: 132 - protein, 707 aa, Homo Sapiens
MSLWQPLVLVLLVLGCCFAAPRQRQSTLVLFPGDLRTNLTDRQLAEEYLYRYGYTRVAEMRGESKSLGPALLLLQKQLSLPETGELDSATLKAMRTPRCGVPDLGRFQTFEGDLKWHHHNITYWIQNYSEDLPRAVIDDAFARAFALWSAVTPLTFTRVYSRDADIVIQFGVAEHGDGYPFDGKDGLLAHAFPPGPGIQGDAHFDDDELWSLGKGVVVPTRFGNADGAACHFPFIFEGRSYSACTTDGRSDGLPWCSTTANYDTDDRFGFCPSERLYTRDGNADGKPCQFPFIFQGQSYSACTTDGRSDGYRWCATTANYDRDKLFGFCPTRADSTVMGGNSAGELCVFPFTFLGKEYSTCTSEGRGDGRLWCATTSNFDSDKKWGFCPDQGYSLFLVAAHEFGHALGLDHSSVPEALMYPMYRFTEGPPLHKDDVNGIRHLYGPRPEPEPRPPTTTTPQPTAPPTVCPTGPPTVHPSERPTAGPTGPPSAGPTGPPTAGPSTATTVPLSPVDDACNVNIFDAIAEIGNQLYLFKDGKYWRFSEGRGSRPQGPFLIADKWPALPRKLDSVFEEPLSKKLFFFSGRQVWVYTGASVLGPRRLDKLGLGADVAQVTGALRSGRGKMLLFSGRRLWRFDVKAQMVDPRSASEVDRMFPGVPLDTHDVFQYREKAYFCQDRFYWRVSSRSELNQVDQVGYVTYDILQCPED

SEQ ID NO: 133 - DNA, 2105 bp, Homo Sapiens
  CDS (88)...(1950)
ggccggccactcccgtctgctgtgacgcgcggacagagagctaccggtggacccacggtgcctccctccctgggatctacacagaccatggccttgccaacggctcgacccctgttggggtcctgtgggacccccgccctcggcagcctcctgttcctgctcttcagcctcggatgggtgcagccctcgaggaccctggctggagagacagggcaggaggctgcacccctggacggagtcctggccaacccacctaacatttccagcctctcccctcgccaactccttggcttcccgtgtgcggaggtgtccggcctgagcacggagcgtgtccgggagctggctgtggccttggcacagaagaatgtcaagctctcaacagagcagctgcgctgtctggctcaccggctctctgagccccccgaggacctggacgccctcccattggacctgctgctattcctcaacccagatgcgttctcggggccccaggcctgcacccgtttcttctcccgcatcacgaaggccaatgtggacctgctcccgaggggggctcccgagcgacagcggctgctgcctgcggctctggcctgctggggtgtgcgggggtctctgctgagcgaggctgatgtgcgggctctgggaggcctggcttgcgacctgcctgggcgctttgtggccgagtcggccgaagtgctgctaccccggctggtgagctgcccgggacccctggaccaggaccagcaggaggcagccagggcggctctgcagggcgggggacccccctacggccccccgtcgacatggtctgtctccacgatggacgctctgcggggcctgctgcccgtgctgggccagcccatcatccgcagcatcccgcagggcatcgtggccgcgtggcggcaacgctcctctcgggacccatcctggcggcagcctgaacggaccatcctccggccgcggttccggcgggaagtggagaagacagcctgtccttcaggcaagaaggcccgcgagatagacgagagcctcatcttctacaagaagtgggagctggaagcctgcgtggatgcggccctgctggccacccagatggaccgcgtgaacgccatccccttcacctacgagcagctggacgtcctaaagcataaactggatgagctctacccacaaggttaccccgagtctgtgatccagcacctgggctacctcttcctcaagatgagccctgaggacattcgcaagtggaatgtgacgtccctggagaccctgaaggctttgcttgaagtcaacaaagggcacgaaatgagtcctcaggctcctcggcggcccctcccacaggtggccaccctgatcgaccgctttgtgaagggaaggggccagctagacaaagacaccctagacaccctgaccgccttctaccctgggtacctgtgctccctcagccccgaggagctgagctccgtgccccccagcagcatctgggcggtcaggccccaggacctggacacgtgtgacccaaggcagctggacgtcctctatcccaaggcccgccttgctttccagaacatgaacgggtccgaatacttcgtgaagatccagtccttcctgggtggggcccccacggaggatttgaaggcgctcagtcagcagaatgtgagcatggacttggccacgttcatgaagctgcggacggatgcggtgctgccgttgactgtggctgaggtgcagaaacttctgggaccccacgtggagggcctgaaggcggaggagcggcaccgcccggtgcgggactggatcctacggcagcggcaggacgacctggacacgctggggctggggctacagggcggcatccccaacggctacctggtcctagacctcagcgtgcaaggacctggacctgttctcaccgtcctggcactgctcctagcctccaccctggcctgagggccccactcccttgctggccccagccctgctggggatccccgcctggccaggagcaggcacgggtgatccccgttccaccccaagagaactcgcgctcagtaaacgggaacatgccccctgcagacacgtaaaaaaaaaaaaaaaaaaaaaaa

SEQ ID NO: 134 - protein, 620 aa, Homo Sapiens
MALPTARPLLGSCGTPALGSLLFLLFSLGWVQPSRTLAGETGQEAAPLDGVLANPPNISSLSPRQLLGFPCAEVSGLSTERVRELAVALAQKNVKLSTEQLRCLAHRLSEPPEDLDALPLDLLLFLNPDAFSGPQACTRFFSRITKANVDLLPRGAPERQRLLPAALACWGVRGSLLSEADVRALGGLACDLPGRFVAESAEVLLPRLVSCPGPLDQDQQEAARAALQGGGPPYGPPSTWSVSTMDALRGLLPVLGQPIIRSIPQGIVAAWRQRSSRDPSWRQPERTILRPRFRREVEKTACPSGKKAREIDESLIFYKKWELEACVDAALLATQMDRVNAIPFTYEQLDVLKHKLDELYPQGYPESVIQHLGYLFLKMSPEDIRKWNVTSLETLKALLEVNKGHEMSPQAPRRPLPQVATLIDRFVKGRGQLDKDTLDTLTAFYPGYLCSLSPEELSSVPPSSIWAVRPQDLDTCDPRQLDVLYPKARLAFQNMNGSEYFVKIQSFLGGAPTEDLKALSQQNVSMDLATFMKLRTDAVLPLTVAEVQKLLGPHVEGLKAEERHRPVRDWILRQRQDDLDTLGLGLQGGIPNGYLVLDLSVQGPGPVLTVLALLLASTLA

SEQ ID NO: 135 - DNA, 2081 bp, Homo Sapiens
  CDS (88)...(1926)
ggccggccactcccgtctgctgtgacgcgcggacagagagctaccggtggacccacggtgcctccctccctgggatctacacagaccatggccttgccaacggctcgacccctgttggggtcctgtgggacccccgccctcggcagcctcctgttcctgctcttcagcctcggatgggtgcagccctcgaggaccctggctggagagacagggcaggaggctgcacccctggacggagtcctggccaacccacctaacatttccagcctctcccctcgccaactccttggcttcccgtgtgcggaggtgtccggcctgagcacggagcgtgtccgggagctggctgtggccttggcacagaagaatgtcaagctctcaacagagcagctgcgctgtctggctcaccggctctctgagccccccgaggacctggacgccctcccattggacctgctgctattcctcaacccagatgcgttctcggggccccaggcctgcacccgtttcttctcccgcatcacgaaggccaatgtggacctgctcccgaggggggctcccgagcgacagcggctgctgcctgcggctctggcctgctggggtgtgcgggggtctctgctgagcgaggctgatgtgcgggctctgggaggcctggcttgcgacctgcctgggcgctttgtggccgagtcggccgaagtgctgctaccccggctggtgagctgcccgggacccctggaccaggaccagcaggaggcagccagggcggctctgcagggcgggggacccccctacggccccccgtcgacatggtctgtctccacgatggacgctctgcggggcctgctgcccgtgctgggccagcccatcatccgcagcatcccgcagggcatcgtggccgcgtggcggcaacgctcctctcgggacccatcctggcggcagcctgaacggaccatcctccggccgcggttccggcgggaagtggagaagacagcctgtccttcaggcaagaaggcccgcgagatagacgagagcctcatcttctacaagaagtgggagctggaagcctgcgtggatgcggccctgctggccacccagatggaccgcgtgaacgccatccccttcacctacgagcagctggacgtcctaaagcataaactggatgagctctacccacaaggttaccccgagtctgtgatccagcacctgggctacctcttcctcaagatgagccctgaggacattcgcaagtggaatgtgacgtccctggagaccctgaaggctttgcttgaagtcaacaaagggcacgaaatgagtcctcaggtggccaccctgatcgaccgctttgtgaagggaaggggccagctagacaaagacaccctagacaccctgaccgccttctaccctgggtacctgtgctccctcagccccgaggagctgagctccgtgccccccagcagcatctgggcggtcaggccccaggacctggacacgtgtgacccaaggcagctggacgtcctctatcccaaggcccgccttgctttccagaacatgaacgggtccgaatacttcgtgaagatccagtccttcctgggtggggcccccacggaggatttgaaggcgctcagtcagcagaatgtgagcatggacttggccacgttcatgaagctgcggacggatgcggtgctgccgttgactgtggctgaggtgcagaaacttctgggaccccacgtggagggcctgaaggcggaggagcggcaccgcccggtgcgggactggatcctacggcagcggcaggacgacctggacacgctggggctggggctacagggcggcatccccaacggctacctggtcctagacctcagcgtgcaaggacctggacctgttctcaccgtcctggcactgctcctagcctccaccctggcctgagggccccactcccttgctggccccagccctgctggggatccccgcctggccaggagcaggcacgggtgatccccgttccaccccaagagaactcgcgctcagtaaacgggaacatgccccctgcagacacgtaaaaaaaaaaaaaaaaaaaaaaa

SEQ ID NO: 136 - protein, 612 aa, Homo Sapiens
MALPTARPLLGSCGTPALGSLLFLLFSLGWVQPSRTLAGETGQEAAPLDGVLANPPNISSLSPRQLLGFPCAEVSGLSTERVRELAVALAQKNVKLSTEQLRCLAHRLSEPPEDLDALPLDLLLFLNPDAFSGPQACTRFFSRITKANVDLLPRGAPERQRLLPAALACWGVRGSLLSEADVRALGGLACDLPGRFVAESAEVLLPRLVSCPGPLDQDQQEAARAALQGGGPPYGPPSTWSVSTMDALRGLLPVLGQPIIRSIPQGIVAAWRQRSSRDPSWRQPERTILRPRFRREVEKTACPSGKKAREIDESLIFYKKWELEACVDAALLATQMDRVNAIPFTYEQLDVLKHKLDELYPQGYPESVIQHLGYLFLKMSPEDIRKWNVTSLETLKALLEVNKGHEMSPQVATLIDRFVKGRGQLDKDTLDTLTAFYPGYLCSLSPEELSSVPPSSIWAVRPQDLDTCDPRQLDVLYPKARLAFQNMNGSEYFVKIQSFLGGAPTEDLKALSQQNVSMDLATFMKLRTDAVLPLTVAEVQKLLGPHVEGLKAEERHRPVRDWILRQRQDDLDTLGLGLQGGIPNGYLVLDLSVQGPGPVLTVLALLLASTLA

SEQ ID NO: 137 - DNA, 2102 bp, Homo Sapiens
  CDS (16)...(1050)
cctgcgacttctctaatgtctgctttggctgcccggctgctgcagcccgcgcacagctgctcccttcgccttcgccctttccacctcgcggcagttcgaaatgaagctgttgtcatttctggaaggaaactggcccagcagatcaagcaggaagtgcggcaggaggtagaagagtgggtggcctcaggcaacaaacggccacacctgagtgtgatcctggttggcgagaatcctgcaagtcactcctatgtcctcaacaaaaccagggcagctgcagttgtgggaatcaacagtgagacaattatgaaaccagcttcaatttcagaggaagaattgttgaatttaatcaataaactgaataatgatgataatgtagatggcctccttgttcagttgcctcttccagagcatattgatgagagaaggatctgcaatgctgtttctccagacaaggatgttgatggctttcatgtaattaatgtaggacgaatgtgtttggatcagtattccatgttaccggctactccatggggtgtgtgggaaataatcaagcgaactggcattccaaccctagggaagaatgtggttgtggctggaaggtcaaaaaacgttggaatgcccattgcaatgttactgcacacagatggggcgcatgaacgtcccggaggtgatgccactgttacaatatctcatcgatatactcccaaagagcagttgaagaaacatacaattcttgcagatattgtaatatctgctgcaggtattccaaatctgatcacagcagatatgatcaaggaaggagcagcagtcattgatgtgggaataaatagagttcacgatcctgtaactgccaaacccaagttggttggagatgtggattttgaaggagtcagacaaaaagctgggtatatcactccagttcctggaggtgttggccccatgacagtggcaatgctaatgaagaataccattattgctgcaaaaaaggtgctgaggcttgaagagcgagaagtgctgaagtctaaagagcttggggtagccactaattaactactgtgtcttctgtgtcacaaacagcactccaggccagctcaagaagcaaagcaggccaatagaaatgcaatatttttaatttattctactgaaatggtttaaaatgatgccttgtatttattgaaagcttaaatgggtgggtgtttctgcacatacctctgcagtacctcaccagggagcattccagtatcatgcagggtcctgtgatctagccaggagcagccattaacctagtgattaatatgggagacattaccatatggaggatggatgcttcactttgtcaagcacctcagttacacattcgccttttctaggattgcatttcccaagtgctattgcaataacagttgatactcattttaggtaccagaccttttgagttcaactgatcaaaccaaaggaaaagtgttgctagagaaaattggggaaaaggtgaaaaagaaaaaatggtagtaattgagcagaaaaaaattaatttatatatgtattgattggcaaccagatttatctaagtagaactgaattggctaggaaaaaagaaaaactgcatgttaatcattttcctaagctgtccttttgaggcttagtcagtttattgggaaaatgtttaggattattccttgctattagtactcattttatgtatgttacccttcagtaagttctccccattttagttttctaggactgaaaggattcttttctacattatacatgtgtgttgtcatatttggcttttgctatatactttaacttcattgttaaatttttgtattgtatagtttctttggtgtatcttaaaacctatttttgaaaaacaaagttggcttgataatcatttgggcagcttgggtaagtacgcaacttacttttccaccaaagaactgtcaccacctgcctgcttttctgtgatgtatgtatcctgttgacttttccagaaattttttaagagtttgagttactattgaatttaatcagactttctgattaaagggttttctttcttttttaataaaacactctgtctggtgtggtatgaatttctg

SEQ ID NO: 138 - protein, 344 aa, Homo Sapiens
MSALAARLLQPAHSCSLRLRPFHLAAVRNEAVVISGRKLAQQIKQEVRQEVEEWVASGNKRPHLSVILVGENPASHSYVLNKTRAAAVVGINSETIMKPASISEEELLNLINKLNNDDNVDGLLVQLPLPEHIDERRICNAVSPDKDVDGFHVINVGRMCLDQYSMLPATPWGVWEIIKRTGIPTLGKNVVVAGRSKNVGMPIAMLLHTDGAHERPGGDATVTISHRYTPKEQLKKHTILADIVISAAGIPNLITADMIKEGAAVIDVGINRVHDPVTAKPKLVGDVDFEGVRQKAGYITPVPGGVGPMTVAMLMKNTIIAAKKVLRLEEREVLKSKELGVATN

SEQ ID NO: 139 - DNA, 2154 bp, Homo Sapiens
  CDS (77)...(1111)
atataaccgcgtggcccgcgcgcgcgcttccctcccggcgcagtcaccggcgcggtctatggctgcgacttctctaatgtctgctttggctgcccggctgctgcagcccgcgcacagctgctcccttcgccttcgccctttccacctcgcggcagttcgaaatgaagctgttgtcatttctggaaggaaactggcccagcagatcaagcaggaagtgcggcaggaggtagaagagtgggtggcctcaggcaacaaacggccacacctgagtgtgatcctggttggcgagaatcctgcaagtcactcctatgtcctcaacaaaaccagggcagctgcagttgtgggaatcaacagtgagacaattatgaaaccagcttcaatttcagaggaagaattgttgaatttaatcaataaactgaataatgatgataatgtagatggcctccttgttcagttgcctcttccagagcatattgatgagagaaggatctgcaatgctgtttctccagacaaggatgttgatggctttcatgtaattaatgtaggacgaatgtgtttggatcagtattccatgttaccggctactccatggggtgtgtgggaaataatcaagcgaactggcattccaaccctagggaagaatgtggttgtggctggaaggtcaaaaaacgttggaatgcccattgcaatgttactgcacacagatggggcgcatgaacgtcccggaggtgatgccactgttacaatatctcatcgatatactcccaaagagcagttgaagaaacatacaattcttgcagatattgtaatatctgctgcaggtattccaaatctgatcacagcagatatgatcaaggaaggagcagcagtcattgatgtgggaataaatagagttcacgatcctgtaactgccaaacccaagttggttggagatgtggattttgaaggagtcagacaaaaagctgggtatatcactccagttcctggaggtgttggccccatgacagtggcaatgctaatgaagaataccattattgctgcaaaaaaggtgctgaggcttgaagagcgagaagtgctgaagtctaaagagcttggggtagccactaattaactactgtgtcttctgtgtcacaaacagcactccaggccagctcaagaagcaaagcaggccaatagaaatgcaatatttttaatttattctactgaaatggtttaaaatgatgccttgtatttattgaaagcttaaatgggtgggtgtttctgcacatacctctgcagtacctcaccagggagcattccagtatcatgcagggtcctgtgatctagccaggagcagccattaacctagtgattaatatgggagacattaccatatggaggatggatgcttcactttgtcaagcacctcagttacacattcgccttttctaggattgcatttcccaagtgctattgcaataacagttgatactcattttaggtaccagaccttttgagttcaactgatcaaaccaaaggaaaagtgttgctagagaaaattggggaaaaggtgaaaaagaaaaaatggtagtaattgagcagaaaaaaattaatttatatatgtattgattggcaaccagatttatctaagtagaactgaattggctaggaaaaaagaaaaactgcatgttaatcattttcctaagctgtccttttgaggcttagtcagtttattgggaaaatgtttaggattattccttgctattagtactcattttatgtatgttacccttcagtaagttctccccattttagttttctaggactgaaaggattcttttctacattatacatgtgtgttgtcatatttggcttttgctatatactttaacttcattgttaaatttttgtattgtatagtttctttggtgtatcttaaaacctatttttgaaaaacaaacttggcttgataatcatttgggcagcttgggtaagtacgcaacttacttttccaccaaagaactgtcagcagctgcctgcttttctgtgatgtatgtatcctgttgacttttccagaaattttttaagagtttgagttactattgaatttaatcagactttctgattaaagggttttctttcttttttaataaaacacatctgtctggtatggta

SEQ ID NO: 140 - DNA, 2627 bp, Homo Sapiens
  CDS (128)...(2230)
gctgacgccttcgagcgcggcccggggcccggagcggccggagcagcccgggtcctgaccccggcccggctcccgctccgggctctgccggcgggcgggcgagcgcggcgcggtccgggccggggggatgtctcggcggacgcgctgcgaggatctggatgagctgcactaccaggacacagattcagatgtgccggagcagagggatagcaagtgcaaggtcaaatggacccatgaggaggacgagcagctgagggccctggtgaggcagtttggacagcaggactggaagttcctggccagccacttccctaaccgcactgaccagcaatgccagtacaggtggctgagagttttgaatccagaccttgtcaaggggccatggaccaaagaggaagaccaaaaagtcatcgagctggttaagaagtatggcacaaagcagtggacactgattgccaagcacctgaagggccggctggggaagcagtgccgtgaacgctggcacaaccacctcaaccctgaggtgaagaagtcttgctggaccgaggaggaggaccgcatcatctgcgaggcccacaaggtgctgggcaaccgctgggccgagatcgccaagatgttgccagggaggacagacaatgctgtgaagaatcactggaactctaccatcaaaaggaaggtggacacaggaggcttcttgagcgagtccaaagactgcaagcccccagtgtacttgctgctggagctcgaggacaaggacggcctccagagtgcccagcccacggaaggccagggaagtcttctgaccaactggccctccgtccctcctaccataaaggaggaggaaaacagtgaggaggaacttgcagcagccaccacatcgaaggaacaggagcccatcggtacagatctggacgcagtgcgaacaccagagcccttggaggaattcccgaagcgtgaggaccaggaaggctccccaccagaaacgagcctgccttacaagtgggtggtggaggcagctaacctcctcatccccgctgtgggttctagcctctctgaagccctggacttgatcgagtcggaccctgatgcttggtgtgacctgagtaaatttgacctccctgaggaaccatctgcagaggacagtatcaacaacagcctagtgcagctgcaagcgtcacatcagcagcaagtcctgccaccccgccagccttccgccctggtgcccagtgtgaccgagtaccgcctggatggccacaccatctcagacctgagccggagcagccggggcgagctgatccccatctcccccagcactgaagtcgggggctctggcattggcacaccgccctctgtgctcaagcggcagaggaagaggcgtgtggctctgtcccctgtcactgagaatagcaccagtctgtccttcctggattcctgtaacagcctcacgcccaagagcacacctgttaagaccctgcccttctcgccctcccagtttctgaacttctggaacaaacaggacacattggagctggagagcccctcgctgacatccaccccagtgtgcagccagaaggtggtggtcaccacaccactgcaccgggacaagacacccctgcaccagaaacatgctgcgtttgtaaccccagatcagaagtactccatggacaacactccccacacgccaaccccgttcaagaacgccctggagaagtacggacccctgaagcccctgccacagaccccgcacctggaggaggacttgaaggaggtgctgcgttctgaggctggcatcgaactcatcatcgaggacgacatcaggcccgagaagcagaagaggaagcctgggctgcggcggagccccatcaagaaagtccggaagtctctggctcttgacattgtggatgaggatgtgaagctgatgatgtccacactgcccaagtctctatccttgccgacaactgccccttcaaactcttccagcctcaccctgtcaggtatcaaagaagacaacagcttgctcaaccagggcttcttgcaggccaagcccgagaaggcagcagtggcccagaagccccgaagccacttcacgacacctgcccctatgtccagtgcctggaagacggtggcctgcggggggaccagggaccagcttttcatgcaggagaaagcccggcagctcctgggccgcctgaagcccagccacacatctcggaccctcatcttgtcctgaggtgttgagggtgtcacgagcccattctcatgtttacaggggttgtgggggcagagggggtctgtgaatctgagagtcattcaggtgacctcctgcagggagccttctgccaccagcccctccccagactctcaggtggaggcaacagggccatgtgctgccctgttgccgagcccagctgtgggcggctcctggtgctaacaacaaagttccacttccaggtctgcctggttccctccccaaggccacagggagctccgtcagcttctcccaagcccacgtcaggcctggcctcatctcagaccctgcttaggatgggggatgtggccaggggtgctcctgtgctcaccctctcttggtgcatttttttggaagaataaaattgcctctctctttg

SEQ ID NO: 141 - protein, 700 aa, Homo Sapiens
MSRRTRCEDLDELHYQDTDSDVPEQRDSKCKVKWTHEEDEQLRALVRQFGQQDWKFLASHFPNRTDQQCQYRWLRVLNPDLVKGPWTKEEDQKVIELVKKYGTKQWTLIAKHLKGRLGKQCRERWHNHLNPEVKKSCWTEEEDRIICEAHKVLGNRWAEIAKMLPGRTDNAVKNHWNSTIKRKVDTGGFLSESKDCKPPVYLLLELEDKDGLQSAQPTEGQGSLLTNWPSVPPTIKEEENSEEELAAATTSKEQEPIGTDLDAVRTPEPLEEFPKREDQEGSPPETSLPYKWVVEAANLLIPAVGSSLSEALDLIESDPDAWCDLSKFDLPEEPSAEDSINNSLVQLQASHQQQVLPPRQPSALVPSVTEYRLDGHTISDLSRSSRGELIPISPSTEVGGSGIGTPPSVLKRQRKRRVALSPVTENSTSLSFLDSCNSLTPKSTPVKTLPFSPSQFLNFWNKQDTLELESPSLTSTPVCSQKVVVTTPLHRDKTPLHQKHAAFVTPDQKYSMDNTPHTPTPFKNALEKYGPLKPLPQTPHLEEDLKEVLRSEAGIELIIEDDIRPEKQKRKPGLRRSPIKKVRKSLALDIVDEDVKLMMSTLPKSLSLPTTAPSNSSSLTLSGIKEDNSLLNQGFLQAKPEKAAVAQKPRSHFTTPAPMSSAWKTVACGGTRDQLFMQEKARQLLGRLKPSHTSRTLILS

SEQ ID NO: 142 - DNA, 942 bp, Homo Sapiens
  CDS (1)...(942)
atgagaattgcagtgatttgcttttgcctcctaggcatcacctgtgccataccagttaaacaggctgattctggaagttctgaggaaaagcagctttacaacaaatacccagatgctgtggccacatggctaaaccctgacccatctcagaagcagaatctcctagccccacagaatgctgtgtcctctgaagaaaccaatgactttaaacaagagacccttccaagtaagtccaacgaaagccatgaccacatggatgatatggatgatgaagatgatgatgaccatgtggacagccaggactccattgactcgaacgactctgatgatgtagatgacactgatgattctcaccagtctgatgagtctcaccattctgatgaatctgatgaactggtcactgattttcccacggacctgccagcaaccgaagttttcactccagttgtccccacagtagacacatatgatggccgaggtgatagtgtggtttatggactgaggtcaaaatctaagaagtttcgcagacctgacatccagtaccctgatgctacagacgagcacatcacctcacacatggaaagcgaggagttgaatggtgcatacaaggccatccccgttgcccaggacctgaacgcgccttctgattgggacagccgtgggaaggacagttatgaaacgagtcagctggatgaccagagtgctgaagcccacagccacaagcagtccagattatataagcggaaagctaatgatgagagcaatgagcattccgatgtgattgatagtcaggaactttccaaagtcagccgtgaattccacagccatgaatttcacagccatgaagatatgctggttgtagaccccaaaagtaaggaagaagataaacacctgaaatttcgtatttctcatgaattagatagtgcatcttctgaggtcaat

SEQ ID NO: 143 - protein, 314 aa, Homo Sapiens
MRIAVICFCLLGITCAIPVKQADSGSSEEKQLYNKYPDAVATWLNPDPSQKQNLLAPQNAVSSEETNDFKQETLPSKSNESHDHMDDMDDEDDDDHVDSQDSIDSNDSDDVDDTDDSHQSDESHHSDESDELVTDFPTDLPATEVFTPVVPTVDTYDGRGDSVVYGLRSKSKKFRRPDIQYPDATDEHITSHMESEELNGAYKAIPVAQDLNAPSDWDSRGKDSYETSQLDDQSAEAHSHKQSRLYKRKANDESNEHSDVIDSQELSKVSREFHSHEFHSHEDMLVVDPKSKEEDKHLKFRISHELDSASSEVN

SEQ ID NO: 144 - DNA, 1524 bp, Homo Sapiens
  CDS (88)...(990)
gcagagcacagcatcgtcgggaccagactcgtctcaggccagttgcagccttctcagccaaacgccgaccaaggaaaactcactaccatgagaattgcagtgatttgcttttgcctcctaggcatcacctgtgccataccagttaaacaggctgattctggaagttctgaggaaaagcagctttacaacaaatacccagatgctgtggccacatggctaaaccctgacccatctcagaagcagaatctcctagccccacagacccttccaagtaagtccaacgaaagccatgaccacatggatgatatggatgatgaagatgatgatgaccatgtggacagccaggactccattgactcgaacgactctgatgatgtagatgacactgatgattctcaccagtctgatgagtctcaccattctgatgaatctgatgaactggtcactgattttcccacggacctgccagcaaccgaagttttcactccagttgtccccacagtagacacatatgatggccgaggtgatagtgtggtttatggactgaggtcaaaatctaagaagtttcgcagacctgacatccagtaccctgatgctacagacgaggacatcacctcacacatggaaagcgaggagttgaatggtgcatacaaggccatccccgttgcccaggacctgaacgcgccttctgattgggacagccgtgggaaggacagttatgaaacgagtcagctggatgaccagagtgctgaaacccacagccacaagcagtccagattatataagcggaaagccaatgatgagagcaatgagcattccgatgtgattgatagtcaggaactttccaaagtcagccgtgaattccacagccatgaatttcacagccatgaagatatgctggttgtagaccccaaaagtaaggaagaagataaacacctgaaatttcgtatttctcatgaattagatagtgcatcttctgaggtcaattaaaaggagaaaaaatacaatttctcactttgcatttagtcaaaagaaaaaatgctttatagcaaaatgaaagagaacatgaaatgcttctttctcagtttattggttgaatgtgtatctatttgagtctggaaataactaatgtgtttgataattagtttagtttgtggcttcatggaaactccctgtaaactaaaagcttcagggttatgtctatgttcattctatagaagaaatgcaaactatcactgtattttaatatttgttattctctcatgaatagaaatttatgtagaagcaaacaaaatacttttacccacttaaaaagagaatataacattttatgtcactataatcttttgttttttaagttagtgtatattttgttgtgattatctttttgtggtgtgaataaatcttttatcttgaatgtaataagaatttggtggtgtcaattgcttatttgttttcccacggttgtccagcaattaataaaacataaccttttttactgcctaaaaaaaaaaaaaaaaaaaa

SEQ ID NO: 145 - protein, 300 aa, Homo Sapiens
MRIAVICFCLLGITCAIPVKQADSGSSEEKQLYNKYPDAVATWLNPDPSQKQNLLAPQTLPSKSNESHDHMDDMDDEDDDDHVDSQDSIDSNDSDDVDDTDDSHQSDESHHSDESDELVTDFPTDLPATEVFTPVVPTVDTYDGRGDSVVYGLRSKSKKFRRPDIQYPDATDEDITSHMESEELNGAYKAIPVAQDLNAPSDWDSRGKDSYETSQLDDQSAETHSHKQSRLYKRKANDESNEHSDVIDSQELSKVSREFHSHEFHSHEDMLVVDPKSKEEDKHLKFRISHELDSASSEVN

SEQ ID NO: 146 - DNA, 861 bp, Homo Sapiens
  CDS (1)...(861)
atgagaattgcagtgatttgcttttgcctcctaggcatcacctgtgccataccagttaaacaggctgattctggaagttctgaggaaaagcagaatgctgtgtcctctgaagaaaccaatgactttaaacaagagacccttccaagtaagtccaacgaaagccatgaccacatggatgatatggatgatgaagatgatgatgaccatgtggacagccaggactccattgactcgaacgactctgatgatgtagatgacactgatgattctcaccagtctgatgagtctcaccattctgatgaatctgatgaactggtcactgattttcccacggacctgccagcaaccgaagttttcactccagttgtccccacagtagacacatatgatggccgaggtgatagtgtggtttatggactgaggtcaaaatctaagaagtttcgcagacctgacatccagtaccctgatgctacagacgagcacatcacctcacacatggaaagcgaggagttgaatggtgcatacaaggccatccccgttgcccaggacctgaacgcgccttctgattgggacagccgtgggaaggacagttatgaaacgagtcagctggatgaccagagtgctgaagcccacagccacaagcagtccagattatataagcggaaagctaatgatgagagcaatgagcattccgatgtgattgatagtcaggaactttccaaagtcagccgtgaattccacagccatgaatttcacagccatgaagatatgctggttgtagaccccaaaagtaaggaagaagataaacacctgaaatttcgtatttctcatgaattagatagtgcatcttctgaggtcaat

SEQ ID NO: 147 - protein, 287 aa, Homo Sapiens
MRIAVICFCLLGITCAIPVKQADSGSSEEKQNAVSSEETNDFKQETLPSKSNESHDHMDDMDDEDDDDHVDSQDSIDSNDSDDVDDTDDSHQSDESHHSDESDELVTDFPTDLPATEVFTPVVPTVDTYDGRGDSVVYGLRSKSKKFRRPDIQYPDATDEHITSHMESEELNGAYKAIPVAQDLNAPSDWDSRGKDSYETSQLDDQSAEAHSHKQSRLYKRKANDESNEHSDVIDSQELSKVSREFHSHEFHSHEDMLVVDPKSKEEDKHLKFRISHELDSASSEVN

SEQ ID NO: 148 - DNA, 3213 bp, Homo Sapiens
  CDS (12)...(2522)
agagactcaagatgattccctttttacccatgttttctctactattgctgcttattgttaaccctataaacgccaacaatcattatgacaagatcttggctcatagtcgtatcaggggtcgggaccaaggcccaaatgtctgtgcccttcaacagattttgggcaccaaaaagaaatacttcagcacttgtaagaactggtataaaaagtccatctgtggacagaaaacgactgttttatatgaatgttgccctggttatatgagaatggaaggaatgaaaggctgcccagcagttttgcccattgaccatgtttatggcactctgggcatcgtgggagccaccacaacgcagcgctattctgacgcctcaaaactgagggaggagatcgagggaaagggatccttcacttactttgcaccgagtaatgaggcttgggacaacttggattctgatatccgtagaggtttggagagcaacgtgaatgttgaattactgaatgctttacatagtcacatgattaataagagaatgttgaccaaggacttaaaaaatggcatgattattccttcaatgtataacaatttggggcttttcattaaccattatcctaatggggttgtcactgttaattgtgctcgaatcatccatgggaaccagattgcaacaaatggtgttgtccatgtcattgaccgtgtgcttacacaaattggtacctcaattcaagacttcattgaagcagaagatgacctttcatcttttagagcagctgccatcacatcggacatattggaggcccttggaagagacggtcacttcacactctttgctcccaccaatgaggcttttgagaaacttccacgaggtgtcctagaaaggttcatgggagacaaagtggcttccgaagctcttatgaagtaccacatcttaaatactctccagtgttctgagtctattatgggaggagcagtctttgagacgctggaaggaaatacaattgagataggatgtgacggtgacagtataacagtaaatggaatcaaaatggtgaacaaaaaggatattgtgacaaataatggtgtgatccatttgattgatcaggtcctaattcctgattctgccaaacaagttattgagctggctggaaaacagcaaaccaccttcacggatcttgtggcccaattaggcttggcatctgctctgaggccagatggagaatacactttgctggcacctgtgaataatgcattttctgatgatactctcagcatggttcagcgcctccttaaattaattctgcagaatcacatattgaaagtaaaagttggccttaatgagctttacaacgggcaaatactggaaaccatcggaggcaaacagctcagagtcttcgtatatcgtacagctgtctgcattgaaaattcatgcatggagaaagggagtaagcaagggagaaacggtgcgattcacatattccgcgagatcatcaagccagcagagaaatccctccatgaaaagttaaaacaagataagcgctttagcaccttcctcagcctacttgaagctgcagacttgaaagagctcctgacacaacctggagactggacattatttgtgccaaccaatgatgcttttaagggaatgactagtgaagaaaaagaaattctgatacgggacaaaaatgctcttcaaaacatcattctttatcacctgacaccaggagttttcattggaaaaggatttgaacctggtgttactaacattttaaagaccacacaaggaagcaaaatctttctgaaagaagtaaatgatacacttctggtgaatgaattgaaatcaaaagaatctgacatcatgacaacaaatggtgtaattcatgttgtagataaactcctctatccagcagacacacctgttggaaatgatcaactgctggaaatacttaataaattaatcaaatacatccaaattaagtttgttcgtggtagcaccttcaaagaaatccccgtgactgtctatacaactaaaattataaccaaagttgtggaaccaaaaattaaagtgattgaaggcagtcttcagcctattatcaaaactgaaggacccacactaacaaaagtcaaaattgaaggtgaacctgaattcagactgattaaagaaggtgaaacaataactgaagtgatccatggagagccaattattaaaaaatacaccaaaatcattgatggagtgcctgtggaaataactgaaaaagagacacgagaagaacgaatcattacaggtcctgaaataaaatacactaggatttctactggaggtggagaaacagaagaaactctgaagaaattgttacaagaagaggtcaccaaggtcaccaaattcattgaaggtggtgatggtcatttatttgaagatgaagaaattaaaagactgcttcagggagacacacccgtgaggaagttgcaagccaacaaaaaagttcaaggttctagaagacgattaagggaaggtcgttctcagtgaaaatccaaaaaccagaaaaaaatgtttatacaaccctaagtcaataacctgaccttagaaaattgtgagagccaagttgacttcaggaactgaaacatcagcacaaagaagcaatcatcaaataattctgaacacaaatttaatatttttttttctgaatgagaaacatgagggaaattgtggagttagcctcctgtggtaaaggaattgaagaaaatataacaccttacaccctttttcatcttgacattaaaagttctggctaactttggaatccattagagaaaaatccttgtcaccagattcattacaattcaaatcgaagagttgtgaactgttatcccattgaaaagaccgagccttgtatgtatgttatggatacataaaatgcacgcaagccattatctctccatgggaagctaagttataaaaataggtgcttggtgtacaaaactttttatatcaaaaggctttgcacatttctatatgagtgggtttactggtaaattatgttattttttacaactaattttgtactctcagaatgtttgtcatatgcttcttgcaatgcatattttttaatctcaaacgtttcaataaaaccatttttcagatataaagagaattacttcaaattgagtaattcagaaaaactcaagatttaagttaaaaagtggtttggacttgggaa

SEQ ID NO: 149 - protein, 836 aa, Homo Sapiens
MIPFLPMFSLLLLLIVNPINANNHYDKILAHSRIRGRDQGPNVCALQQILGTKKKYFSTCKNWYKKSICGQKTTVLYECCPGYMRMEGMKGCPAVLPIDHVYGTLGIVGATTTQRYSDASKLREEIEGKGSFTYFAPSNEAWDNLDSDIRRGLESNVNVELLNALHSHMINKRMLTKDLKNGMIIPSMYNNLGLFINHYPNGVVTVNCARIIHGNQIATNGVVHVIDRVLTQIGTSIQDFIEAEDDLSSFRAAAITSDILEALGRDGHFTLFAPTNEAFEKLPRGVLERFMGDKVASEALMKYHILNTLQCSESIMGGAVFETLEGNTIEIGCDGDSITVNGIKMVNKKDIVTNNGVIHLIDQVLIPDSAKQVIELAGKQQTTFTDLVAQLGLASALRPDGEYTLLAPVNNAFSDDTLSMVQRLLKLILQNHILKVKVGLNELYNGQILETIGGKQLRVFVYRTAVCIENSCMEKGSKQGRNGAIHIFREIIKPAEKSLHEKLKQDKRFSTFLSLLEAADLKELLTQPGDWTLFVPTNDAFKGMTSEEKEILIRDKNALQNIILYHLTPGVFIGKGFEPGVTNILKTTQGSKIFLKEVNDTLLVNELKSKESDIMTTNGVIHVVDKLLYPADTPVGNDQLLEILNKLIKYIQIKFVRGSTFKEIPVTVYTTKIITKVVEPKIKVIEGSLQPIIKTEGPTLTKVKIEGEPEFRLIKEGETITEVIHGEPIIKKYTKIIDGVPVEITEKETREERIITGPEIKYTRISTGGGETEETLKKLLQEEVTKVTKFIEGGDGHLFEDEEIKRLLQGDTPVRKLQANKKVQGSRRRLREGRSQ

SEQ ID NO: 150 - DNA, 3077 bp, Homo Sapiens
  CDS (28)...(2367)
aacagaactgcaacggagagactcaagatgattccctttttacccatgttttctctactattgctgcttattgttaaccctataaacgccaacaatcattatgacaagatcttggctcatagtcgtatcaggggtcgggaccaaggcccaaatgtctgtgcccttcaacagattttgggcaccaaaaagaaatacttcagcacttgtaagaactggtataaaaagtccatctgtggacagaaaacgactgttttatatgaatgttgccctggttatatgagaatggaaggaatgaaaggctgcccagcagttttgcccattgaccatgtttatggcactctgggcatcgtgggagccaccacaacgcagcgctattctgacgcctcaaaactgagggaggagatcgagggaaagggatccttcacttactttgcaccgagtaatgaggcttgggacaacttggattctgatatccgtagaggtttggagagcaacgtgaatgttgaattactgaatgctttacatagtcacatgattaataagagaatgttgaccaaggacttaaaaaatggcatgattattccttcaatgtataacaatttggggcttttcattaaccattatcctaatggggttgtcactgttaattgtgctcgaatcatccatgggaaccagattgcaacaaatggtgttgtccatgtcattgaccgtgtgcttacacaaattggtacctcaattcaagacttcattgaagcagaagatgacctttcatcttttagagcagctgccatcacatcggacatattggaggcccttggaagagacggtcacttcacactctttgctcccaccaatgaggcttttgagaaacttccacgaggtgtcctagaaaggttcatgggagacaaagtggcttccgaagctcttatgaagtaccacatcttaaatactctccagtgttctgagtctattatgggaggagcagtctttgagacgctggaaggaaatacaattgagataggatgtgacggtgacagtataacagtaaatggaatcaaaatggtgaacaaaaaggatattgtgacaaataatggtgtgatccatttgattgatcaggtcctaattcctgattctgccaaacaagttattgagctggctggaaaacagcaaaccaccttcacggatcttgtggcccaattaggcttggcatctgctctgaggccagatggagaatacactttgctggcacctgtgaataatgcattttctgatgatactctcagcatggttcagcgcctccttaaattaattctgcagaatcacatattgaaagtaaaagttggccttaatgagctttacaacgggcaaatactggaaaccatcggaggcaaacagctcagagtcttcgtatatcgtacagctgtctgcattgaaaattcatgcatggagaaagggagtaagcaagggagaaacggtgcgattcacatattccgcgagatcatcaagccagcagagaaatccctccatgaaaagttaaaacaagataagcgctttagcaccttcctcagcctacttgaagctgcagacttgaaagagctcctgacacaacctggagactggacattatttgtgccaaccaatgatgcttttaagggaatgactagtgaagaaaaagaaattctgatacgggacaaaaatgctcttcaaaacatcattctttatcacctgacaccaggagttttcattggaaaaggatttgaacctggtgttactaacattttaaagaccacacaaggaagcaaaatctttctgaaagaagtaaatgatacacttctggtgaatgaattgaaatcaaaagaatctgacatcatgacaacaaatggtgtaattcatgttgtagataaactcctctatccagcagacacacctgttggaaatgatcaactgctggaaatacttaataaattaatcaaatacatccaaattaagtttgttcgtggtagcaccttcaaagaaatccccgtgactgtctataagccaattattaaaaaatacaccaaaatcattgatggagtgcctgtggaaataactgaaaaagagacacgagaagaacgaatcattacaggtcctgaaataaaatacactaggatttctactggaggtggagaaacagaagaaactctgaagaaattgttacaagaagaggtcaccaaggtcaccaaattcattgaaggtggtgatggtcatttatttgaagatgaagaaattaaaagactgcttcagggagacacacccgtgaggaagttgcaagccaacaaaaaagttcaaggttctagaagacgattaagggaaggtcgttctcagtgaaaatccaaaaaccagaaaaaaatgtttatacaaccctaagtcaataacctgaccttagaaaattgtgagagccaagttgacttcaggaactgaaacatcagcacaaagaagcaatcatcaaataattctgaacacaaatttaatatttttttttctgaatgagaaacatgagggaaattgtggagttagcctcctgtggagttagcctcctgtggtaaaggaattgaagaaaatataacaccttacaccctttttcatcttgacattaaaagttctggctaactttggaatccattagagaaaaatccttgtcaccagattcattacaattcaaatcgaagagttgtgaactgttatcccattgaaaagaccgagccttgtatgtatgttatggatacataaaatgcacgcaagccattatctctccatgggaagctaagttataaaaataggtgcttggtgtacaaaactttttatatcaaaaggctttgcacatttctatatgagtgggtttactggtaaattatgttattttttacaactaattttgtactctcagaatgtttgtcatatgcttcttgcaatgcatattttttaatctcaaacgtttcaataaaaccatttttcagatataaagagaattacttcaaattgagtaattcagaaaaactcaagatttaagttaaaaagtggtttggacttgggaacag

SEQ ID NO: 151 - protein, 779 aa, Homo Sapiens [sequence omitted]

SEQ ID NO: 152 - DNA, 5037 bp, Homo Sapiens
  CDS (190)...(2451)
aagcgcttcactgagcgctcgccgccgcccagcctctcctctcgcgcctcctagctcttcgcagagcaaccaggagccaggagtggtctagagcccgagggtgggaagggggagtctgtctggcttttctcctatcttgcttctttttcctcttcccttcccactcttgttcaagcgagtgtgtgagctatggagcgaagagcctggagtctgcagtgcactgctttcgtcctcttttgcgcttggtgtgcactgaacagtgcaaaagcgaaaaggcaatttgtcaatgaatgggcagcggagatccccgggggcccggaagcagcctcggccatcgccgaggagctgggctatgaccttttgggtcagattggttcacttgaaaatcactacttattcaaacataaaaaccaccccagaaggtctcgaaggagtgcctttcatatcactaagagattatctgatgatgatcgtgtgatatgggctgaacaacagtatgaaaaagaaagaagtaaacgttcagctctaagggactcagcactaaatctcttcaatgatcccatgtggaatcagcaatggtacttgcaagataccaggatgacggcagccctgcccaagctggaccttcatgtgatacctgtttggcaaaaaggcattacgggcaaaggagttgttatcaccgtactggatgatggtttggagtggaatcacacggacatttatgccaactatgatccagaggctagctatgattttaatgataatgaccatgatccatttccccgatatgatcccacaaacgagaacaaacacgggaccagatgtgcaggagaaattgccatgcaagcaaataatcacaaatgcggggttggagttgcatacaattccaaagttggaggcataagaatgctggatggcattgtgacggatgctattgaggccagttcaattggattcaatcctggacacgtggatatttacagtgcaagctggggccctaatgatgatgggaaaactgtggaggggcctggccggctagcccagaaggcttttgaatatggtgtcaaacaggggagacaggggaaggggtccatcttcgtctgggcttcgggaaacggggggcgtcagggagataattgtgactgtgatggctacacagacagcatctacaccatctccatcagcagtgcctcccagcaaggcctatccccctggtacgctgagaagtgctcctccacactggccacctcttacagcggcggagattacaccgaccagagaatcacgagcgctgacctgcacaatgactgcacggagacgcacacaggcacctcggcctctgcacctctggctgctggcatcttcgctctggccctggaagcaaacccaaatctcacctggcgagatatgcagcacctggttgtctggacctctgagtatgacccgctggccaataaccctggatggaaaaagaatggagcaggcttgatggtgaatagtcgatttggatttggcttgctaaatgccaaagctctggtggatttagctgaccccaggacctggaggagcgtgcctgagaagaaagagtgtgttgtaaaggacaatgactttgagcccagagccctgaaagctaatggagaagttatcattgaaattccaacaagagcttgtgaaggacaagaaaatgctatcaagtccctggagcatgtacaatttgaagcaacaattgaatattcccgaagaggagaccttcatgtcacacttacttctgctgctggaactagcactgtgctcttggctgaaagagaacgggatacatctcctaatggctttaagaactgggacttcatgtctgttcacacatggggagagaaccctataggtacttggactttgagaattacagacatgtctggaagaattcaaaatgaaggaagaattgtgaactggaagctgattttgcacgggacctcttctcagccagagcatatgaagcagcctcgtgtgtacacgtcctacaacactgttcagaatgacagaagaggggtggagaagatggtggatccaggggaggagcagcccacacaagagaaccctaaggagaacaccctggtgtccaaaagccccagcagcagcagcgtagggggccggagggatgagttggaggagggagccccttcccaggccatgctgcgactcctgcaaagtgctttcagtaaaaactcaccgccaaagcaatcaccaaagaagtccccaagtgcaaagctcaacatcccttatgaaaacttctacgaagccctggaaaagctgaacaaaccttcccagcttaaagactctgaagacagtctgtataatgactatgttgatgttttttataacactaaaccttacaagcacagagacgaccggctgcttcaagctctggtggacattctgaatgaggaaaattaaaataagtgtgtggtcccaagttggaaatattcatgcttcttccttaccctgcgattttgcctgtgtctgaagtggttgttttgtcatgaattcttatgcttataatatcctttgtggcaccttttctttttctccctaaactgtacatgtgaaggggatgagctcaagcaggaagttcaacttccagaattgatcataggtatttcaaaacacatctttcctgtctgcacaagtgaagtgttttgttctttctggagtcacagttgacaaaaagctcttacactacattagaacactgcattagagcccatttcaattctcaaaagaaaaggcaaaacctgggatatcaattaatttgaaaacataatctgcaaagaatgagaaggagtcagaaactgtttctgtagcttgttccctgtcttgtccatgtggttcttcaaattttgatgccaagaaagtatttggtaggcctaatgaaggagttcactgtaagactcattccctagatctttctattccaaagtgccactcattcctgtagtcaaaatctggtcatgttggtcaaaagctggattatttagatctagaaacagatcttgaaatctgaatgctctggtttgagcaattttcgaacattctttgcctggtgcactgtgtctgtggtgccagaggcgtccgtggatccagaggtggttatgactcgtgctgcatgcctggtctttcctctgtttctccttctgaaagttttctatacctgtctcctttctcagccacaaaataaatgttgggagaaatgatatataccactttcccagaaaaaaaaaaacttacacttgggacttggcaaattcctagtcacaatttttttcagcagtaacaggaaaccacttatcacatggagacctaatgtaataatagaaaaatactcataatagggagaaaccaagagaagttttgtttttgtttttttccaactgtgttcattagaacagcgtgttctaagtatttgaaactgaatgtttattccttgatactaaaagttcttctccaatcctatcactgatagtgtccaaattctcaccaaattgctcctaagcttcaaatcagaagcagaaactggcaggccatggaccttaattgtccctcaggtagattttgtttggtatgcagaatgtttttaaaatatgagtggttattgaaaatatgatgtttcacataaaacctcattctcggacccatctttgctcatggcaacagttagctggagctgagtagcagctgcctgattagatgactctcagtccccatggcaccctgctccatgttacctagagcaggcacttgattccttgctgggcagtatccaataggcatttgattttgcccactcctacactaagcgaatgtgtacaaagtgtaaatgcattaggaaaaacaaactacccgcatcttctgttaggcaggatctgtacaataataattatgagtttgcttatgtaatctcacctcacctggatgatcactaatactaattcatttattactaaccttctggcttccttctctcaatatgcttacaaagtctccagtcacctacaatgctggctttctcccactgagtttgctgtttgcaatttttccatgaagtttgaacttcataaggtaattcatggcattgaactggttcatgaaaagaacactagagtctgtcatttgctttggcttgaagtatggttggtaacacaaattttcacctgctcttctaccatttgaatttgtgtagagggtgtttgcagagcaatgcccgtaatgcttagagaatgttctcctaaaagacttgcggaatcactctgtccttggaagtttcatatattgtttgatatgaagtgttagatagaatttccaatattggagcatatcaaaaagtattaaaactaaaaaggaccagagaattcttagattggcccggaaaggccaataaagagttagaatgaaaactcattacttttccattcccaatctagtgctagatgtataaatctttcttttgattcttcctaacaaaatattttctgggttaaaaccccagccaactcattgggttgtagccaaaggttcactctcaagaagctttaatatttaaataaaatcatattgaatgtttccaacctggagtataatattcagatataaaacagttttgtcagtctttcttagtgcctgtgtggatttttgtgaaaatgtcaaagagaaaacttatatactatttcccttgaaattttaaactatattttctttacaggtatttataatataccaatgcttttatcaaacagaattttaaagagcataataaattatattaaagaaccaaaagttttcctgagaataagaaagtttcacccaataaaatatttttgaaaggcatgttcctctgtcaatgaaaaaaagtacatgtatgtgttgtgatattaaaagtgacatttgtctaatagcctaatacaacatgtagctgagtttaacatgtgtggtcttggtattcttaagggaacttccacattatacatttgatgtattgaccagaat

SEQ ID NO: 153 - protein, 753 aa, Homo Sapiens [sequence omitted]

SEQ ID NO: 154 - DNA, 1412 bp, Homo Sapiens
  CDS (160)...(1362)
ctccttgggcgatcgcctgggtagaggagaggagtttccggggctcgggtccgggtcgccttccaggggaacgagcgcggaagcaagtgggcggcgagaggcggagcaagagacgctggagggcgtggacgcagcgggctttggaaaggccccaagttaatgaggcgtgcgccggctgccgagcgcctcttggagctgggctttcccccgcggtgcgggcgccaggagccgccttttccgctgggtgtcactcgggggtggggaagatggcccattcaaaagcgccgcgagggggcccggccagtgcccttcagtgagcgctcgcaagaggacggcagaggcccggcagctcggagctccgggaccttgtggcgcatcaggacgcggctgtccctctgccgggacccagagccgccgccgccgctctgcctcctgcgtgttagcctcctctgcgcgctccgggcaggcggccgtgggagccgctggggcgaggacggcgcgaggctgctgctgctgcccccggcccgcgcggctggaaacggagaggccgagccaagcggcggcccctcttatgctgggaggatgctggagagtagcggctgcaaagcgctgaaggagggcgtgctggagaagcgcagcgacgggttgttgcagctctggaagaaaaagtgttgcatcctcaccgaggaagggctgctgcttatcccgcccaagcagctgcaacaccagcagcagcagcaacagcagcagcagcagcagcaacaacagcccgggcaggggccggccgagccgtcccaacccagtggccccgctgtcgccagcctcgagccgccggtcaagctcaaggaactgcacttctccaacatgaagaccgtggactgtgtggagcgcaagggcaagtacatgtacttcactgtggtgatggcagagggcaaggagatcgactttcggtgcccgcaagaccagggctggaacgccgagatcacgctgcagatggtgcagtacaagaatcgtcaggccatcctggcggtcaaatccacgcggcagaagcagcagcacctggtccagcagcagcccccctcgcagccgcagccgcagccgcagctccagccccaaccccagcctcagcctcagccgcaaccccagccccaatcacaaccccagcctcagccccaacccaagcctcagccccagcagctccacccgtatccgcatccacatccacatccacactctcatcctcactcgcacccacaccctcacccgcacccgcatccgcaccaaataccgcacccacacccacagccgcactcgcagccgcacgggcaccggcttctccgcagcacctccaactctgcctgaaaggggcagctcccgggcaagacaaggttttgaggacttgaggaagtggg

SEQ ID NO: 155 - protein, 400 aa, Homo Sapiens
MRRAPAAERLLELGFPPRCGRQEPPFPLGVTRGWGRWPIQKRREGARPVPFSERSQEDGRGPAARSSGTLWRIRTRLSLCRDPEPPPPLCLLRVSLLCALRAGGRGSRWGEDGARLLLLPPARAAGNGEAEPSGGPSYAGRMLESSGCKALKEGVLEKRSDGLLQLWKKKCCILTEEGLLLIPPKQLQHQQQQQQQQQQQQQQPGQGPAEPSQPSGPAVASLEPPVKLKELHFSNMKTVDCVERKGKYMYFTVVMAEGKEIDFRCPQDQGWNAEITLQMVQYKNRQAILAVKSTRQKQQHLVQQQPPSQPQPQPQLQPQPQPQPQPQPQPQSQPQPQPQPKPQPQQLHPYPHPHPHPHSHPHSHPHPHPHPHPHQIPHPHPQPHSQPHGHRLLRSTSNSA

SEQ ID NO: 156 - DNA, 1925 bp, Homo Sapiens
  CDS (73)...(654)
cggcacgagggtcccgcgcgctcctccgacccgctccgctccgctccgctcggccccgcgccgcccgtcaacatgatccgctgcggcctggcctgcgagcgctgccgctggatcctgcccctgctcctactcagcgccatcgccttcgacatcatcgcgctggccggccgcggctggttgcagtctagcgaccacggccagacgtcctcgctgtggtggaaatgctcccaagagggcggcggcagcgggtcctacgaggagggctgtcagagcctcatggagtacgcgtggggtagagcagcggctgccatgctcttctgtggcttcatcatcctggtgatctgtttcatcctctccttcttcgccctctgtggaccccagatgcttgtcttcctgagagtgattggaggtctccttgccttggctgctgtgttccagatcatctccctggtaatttaccccgtgaagtacacccagaccttcacccttcatgccaaccctgctgtcacttacatctataactgggcctacggctttgggtgggcagccacgattatcctgattggctgtgccttcttcttctgctgcctccccaactacgaagatgaccttctgggcaatgccaagcccaggtacttctacacatctgcctaacttgggaatgaatgtgggagaaaatcgctgctgctgagatggactccagaagaagaaactgtttctccaggcgactttgaacccattttttggcagtgttcatattattaaactagtcaaaaatgctaaaataatttgggagaaaatattttttaagtagtgttatagtttcatgtttatcttttattatgttttgtgaagttgtgtcttttcactaattacctatactatgccaatatttccttatatctatccataacatttatactacatttgtaagagaatatgcacgtgaaacttaacactttataaggtaaaaatgaggtttccaagatttaataatctgatcaagttcttgttatttccaaatagaatggactcggtctgttaagggctaaggagaagaggaagataaggttaaaagttgttaatgaccaaacattctaaaagaaatgcaaaaaaaaagtttattttcaagccttcgaactatttaaggaaagcaaaatcatttcctaaatgcatatcatttgtgagaatttctcattaatatcctgaatcattcatttcagctaaggcttcatgttgactcgatatgtcatctaggaaagtactatttcatggtccaaacctgttgccatagttggtaaggctttcctttaagtgtgaaatatttagatgaaattttctcttttaaagttctttatagggttagggtgtgggaaaatgctatattaataaatctgtagtgttttgtgtttatatgttcagaaccagagtagactggattgaaagatggactgggtctaatttatcatgactgatagatctggttaagttgtgtagtaaagcattaggagggtcattcttgtcacaaaagtgccactaaaacagcctcaggagaataaatgacttgcttttctaaatctcaggtttatctgggctctatcatatagacaggcttctgatagtttgcaactgtaagcagaaacctacatatagttaaaatcctggtctttcttggtaaacagattttaaatgtctgatataaaacatgccacaggagaattcggggatttgagtttctctgaatagcatatatatgatgcatcggataggtcattatgattttttaccatttcgacttacataatgaaaaccaattcattttaaatatcagattattattttgtaagttgtggaaaaagctaattgtagttttcattatgaagttttcccaataaaccaggtattctaaaaaaaaaaaaaaaaaa

SEQ ID NO: 157 - protein, 193 aa, Homo Sapiens
MIRCGLACERCRWILPLLLLSAIAFDIIALAGRGWLQSSDHGQTSSLWWKCSQEGGGSGSYEEGCQSLMEYAWGRAAAAMLFCGFIILVICFILSFFALCGPQMLVFLRVIGGLLALAAVFQIISLVIYPVKYTQTFTLHANPAVTYIYNWAYGFGWAATIILIGCAFFFCCLPNYEDDLLGNAKPRYFYTSA

SEQ ID NO: 158 - DNA, 1925 bp, Homo Sapiens
  CDS (73)...(654)
cggcacgagggtcccgcgcgctcctccgacccgctccgctccgctccgctcggccccgcgccgcccgtcaacatgatccgctgcggcctggcctgcgagcgctgccgctggatcctgcccctgctcctactcagcgccatcgccttcgacatcatcgcgctggccggccgcggctggttgcagtctagcgaccacggccagacgtcctcgctgtggtggaaatgctcccaagagggcggcggcagcgggtcctacgaggagggctgtcagagcctcatggagtacgcgtggggtagagcagcggctgccatgctcttctgtggcttcatcatcctggtgatctgtttcatcctctccttcttcgccctctgtggaccccagatgcttgtcttcctgagagtgattggaggtctccttgccttggctgctgtgttccagatcatctccctggtaatttaccccgtgaagtacacccagaccttcacccttcatgccaaccctgctgtcacttacatctataactgggcctacggctttgggtgggcagccacgattatcctgattggctgtgccttcttcttctgctgcctcctcaactacgaagatgaccttctgggcaatgccaagcccaggtacttctacacatctgcctaacttgggaatgaatgtgggagaaaatcgctgctgctgagatggactccagaagaagaaactgtttctccaggcgactttgaacccattttttggcagtgttcatattattaaactagtcaaaaatgctaaaataatttgggagaaaatattttttaagtagtgttatagtttcatgtttatcttttattatgttttgtgaagttgtgtcttttcactaattacctatactatgccaatatttccttatatctatccataacatttatactacatttgtaagagaatatgcacgtgaaacttaacactttataaggtaaaaatgaggtttccaagatttaataatctgatcaagttcttgttatttccaaatagaatggactcggtctgttaagggctaaggagaagaggaagataaggttaaaagttgttaatgaccaaacattctaaaagaaatgcaaaaaaaaagtttattttcaagccttcgaactatttaaggaaagcaaaatcatttcctaaatgcatatcatttgtgagaatttctcattaatatcctgaatcattcatttcagctaaggcttcatgttgactcgatatgtcatctaggaaagtactatttcatggtccaaacctgttgccatagttggtaaggctttcctttaagtgtgaaatatttagatgaaattttctcttttaaagttctttatagggttagggtgtgggaaaatgctatattaataaatctgtagtgttttgtgtttatatgttcagaaccagagtagactggattgaaagatggactgggtctaatttatcatgactgatagatctggttaagttgtgtagtaaagcattaggagggtcattcttgtcacaaaagtgccactaaaacagcctcaggagaataaatgacttgcttttctaaatctcaggtttatctgggctctatcatatagacaggcttctgatagtttgcaactgtaagcagaaacctacatatagttaaaatcctggtctttcttggtaaacagattttaaatgtctgatataaaacatgccacaggagaattcggggatttgagtttctctgaatagcatatatatgatgcatcggataggtcattatgattttttaccatttcgacttacataatgaaaaccaattcattttaaatatcagattattattttgtaagttgtggaaaaagctaattgtagttttcattatgaagttttcccaataaaccaggtattctaaaaaaaaaaaaaaaaaa

SEQ ID NO: 159 - protein, 193 aa, Homo Sapiens
MIRCGLACERCRWILPLLLLSAIAFDIIALAGRGWLQSSDHGQTSSLWWKCSQEGGGSGSYEEGCQSLMEYAWGRAAAAMLFCGFIILVICFILSFFALCGPQMLVFLRVIGGLLALAAVFQIISLVIYPVKYTQTFTLHANPAVTYIYNWAYGFGWAATIILIGCAFFFCCLLNYEDDLLGNAKPRYFYTSA

SEQ ID NO: 160 - DNA, 2304 bp, Homo Sapiens
  CDS (77)...(1372)
gtccccgcagcgccgtcgcgccctcctgccgcaggccaccgaggccgccgccgtctagcgccccgacctcgccaccatgagagccctgctggcgcgcctgcttctctgcgtcctggtcgtgagcgactccaaaggcagcaatgaacttcatcaagttccatcgaactgtgactgtctaaatggaggaacatgtgtgtccaacaagtacttctccaacattcactggtgcaactgcccaaagaaattcggagggcagcactgtgaaatagataagtcaaaaacctgctatgaggggaatggtcacttttaccgaggaaaggccagcactgacaccatgggccggccctgcctgccctggaactctgccactgtccttcagcaaacgtaccatgcccacagatctgatgctcttcagctgggcctggggaaacataattactgcaggaacccagacaaccggaggcgaccctggtgctatgtgcaggtgggcctaaagccgcttgtccaagagtgcatggtgcatgactgcgcagatggaaaaaagccctcctctcctccagaagaattaaaatttcagtgtggccaaaagactctgaggccccgctttaagattattgggggagaattcaccaccatcgagaaccagccctggtttgcggccatctacaggaggcaccgggggggctctgtcacctacgtgtgtggaggcagcctcatcagcccttgctgggtgatcagcgccacacactgcttcattgattacccaaagaaggaggactacatcgtctacctgggtcgctcaaggcttaactccaacacgcaaggggagatgaagtttgaggtggaaaacctcatcctacacaaggactacagcgctgacacgcttgctcaccacaacgacattgccttgctgaagatccgttccaaggagggcaggtgtgcgcagccatcccggactatacagaccatctgcctgccctcgatgtataacgatccccagtttggcacaagctgtgagatcactggctttggaaaagagaattctaccgactatctctatccggagcagctgaaaatgactgttgtgaagctgatttcccaccgggagtgtcagcagccccactactacggctctgaagtcaccaccaaaatgctatgtgctgctgacccccaatggaaaacagattcctgccagggagactcagggggacccctcgtctgttccctccaaggccgcatgactttgactggaattgtgagctggggccgtggatgtgccctgaaggacaagccaggcgtctacacgagagtctcacacttcttaccctggatccgcagtcacaccaaggaagagaatggcctggccctctgagggtccccagggaggaaacgggcaccacccgctttcttgctggttgtcatttttgcagtagagtcatctccatcagctgtaagaagagactgggaagataggctctgcacagatggatttgcctgtggcaccaccagggtgaacgacaatagctttaccctcacggataggcctgggtgctggctgcccagaccctctggccaggatggaggggtggtcctgactcaacatgttactgaccagcaacttgtctttttctggactgaagcctgcaggagttaaaaagggcagggcatctcctgtgcatgggctcgaagggagagccagctcccccgaccggtgggcatttgtgaggcccatggttgagaaatgaataatttcccaattaggaagtgtaagcagctgaggtctcttgagggagcttagccaatgtgggagcagcggtttggggagcagagacactaacgacttcagggcagggctctgatattccatgaatgtatcaggaaatatatatgtgtgtgtatgtttgcacacttgttgtgtgggctgtgagtgtaagtgtgagtaagagctggtgtctgattgttaagtctaaatatttccttaaactgtgtggactgtgatgccacacagagtggtctttctggagaggttataggtcactcctggggcctcttgggtcccccacgtgacagtgcctgggaatgtacttattctgcagcatgacctgtgaccagcactgtctcagtttcactttcacatagatgtccctttcttggccagttatcccttccttttagcctagttcatccaatcctcactgggtggggtgaggaccactccttacactgaatatttatatttcactatttttatttatatttttgtaattttaaataaaagtgatcaataaaatgtgatttttctga

SEQ ID NO: 161 - protein, 431 aa, Homo Sapiens
MRALLARLLLCVLVVSDSKGSNELHQVPSNCDCLNGGTCVSNKYFSNIHWCNCPKKFGGQHCEIDKSKTCYEGNGHFYRGKASTDTMGRPCLPWNSATVLQQTYHAHRSDALQLGLGKHNYCRNPDNRRRPWCYVQVGLKPLVQECMVHDCADGKKPSSPPEELKFQCGQKTLRPRFKIIGGEFTTIENQPWFAAIYRRHRGGSVTYVCGGSLISPCWVISATHCFIDYPKKEDYIVYLGRSRLNSNTQGEMKFEVENLILHKDYSADTLAHHNDIALLKIRSKEGRCAQPSRTIQTICLPSMYNDPQFGTSCEITGFGKENSTDYLYPEQLKMTVVKLISHRECQQPHYYGSEVTTKMLCAADPQWKTDSCQGDSGGPLVCSLQGRMTLTGIVSWGRGCALKDKPGVYTRVSHFLPWIRSHTKEENGLAL

SEQ ID NO: 162 - DNA, 3707 bp, Homo Sapiens
  CDS (231)...(3299)
gtgtgtccctccagtgccgcttgccccttgttctcccaagcaccagggggacccctgtcttagattcaagttgcatcactagactaacagctctgggaacagaggacactgaggactagtttgggaaatgaaaaacatctgcaatgagaggtaattttattctcctcttccttttaccctagtctcactctccatagtaggacctggatctttgcatcagagaaaacataatgaacaataactggaatgtgtgtttctttcttttctgccctagtattactagaacatttgcatcgggaaaaacagaaaaggtgatctttcaagcactcaaggagttaggtcttcccagtggaaagaatgatgaaattgagcccacagcattttcttatgaaaagttctatgaactgacacaaaagatttgtcctcggacagatatagaagatcttttcaaaaaaatcaatggagacaaaactgattatttaacggtagaccaattagtgagctttctaaatgaacatcaacgagatcctcgattgaatgaaattttatttccattttatgatgccaaaagggcaatgcagatcattgagatgtatgaacctgatgaagatttgaagaaaaaaggccttatatcaagtgatgggttttgcagatatctgatgtcagatgaaaacgccccagtcttcctagatcgtttagaactttaccaagaaatggaccatcctctggctcactacttcatcagttcttcccataacacttatctcactggcagacagttcggcgggaagtcttcggtagaaatgtacagacaggttctcctggctggttgcagatgtgttgaacttgactgctgggatggaaaaggtgaggaccaagaaccaataataactcatggaaaagcaatgtgtacagatatcctttttaaggatgtaattcaagccatcaaggaaactgcatttgtcacatcagaatatcctgtaattctctcctttgaaaatcactgcagcaaatatcaacagtacaagatgtccaaatattgcgaagatctatttggggatctcctgttgaaacaagcacttgaatcacatccactggaaccaggcagacctttgccatcccccaatgacctcaaaagaaaaatactcataaaaaacaagcggctgaaacctgaagttgaaaaaaaacagctggaagctttgagaagcatgatggaagctggagaatctgcctccccagcaaacatcttagaggacgataatgaagaggagatcgaaagtgctgaccaagaggaggaagctcaccccgaattcaaatttggaaatgaactttctgctgatgacttgggtcacaaggaagctgttgcaaatagcgtcaagaagggcctggtcactgtagaagatgagcaggcgtggatggcatcttataaatatgtaggtgctaccactaatatccatccatatttgtccacaatgatcaactatgcccagcctgtaaagtttcaaggtttccatgtggcagaagaacgcaatattcattataacatgtcttcttttaatgaatcagtcggtcttggctacttgaagacacatgcaattgaatttgtcaattataacaaacggcaaatgagtcgcatttaccccaagggaggccgagtcgattccagtaattacatgcctcagattttctggaacgctggctgccagatggtttcactgaactatcaaaccccagatttagcgatgcaattgaatcagggaaaatttgagtataatggatcgtgcgggtaccttctcaaaccagatttcatgaggcggcctgatcgaacatttgaccccttctctgaaacgcctgttgatggggttattgcagccacttgctcagtgcaggttatatcaggtcaattcttatcagataagaaaattggcacctacgtagaggtggatatgtatgggttgcccactgacaccatacgtaaggaattccgaactcgcatggttatgaataatggactcaatccagtttacaatgaagagtcacttgtatttcggaaggtgatcctgccggacctggctgtcttgagaatagctgtgtatgatgataacaacaagctgattggccagaggattcctccgcttgatggcctccaagccggatatcgacacatttcccttcgaaatgagggaaataaaccattatcactaccaacaattttctgcaatattgttcttaaaacatatgtgcctgatggatttggagatatcgtggatgctttatcagatccaaagacatttctctcaattacagaaaagagagcagaccaaatgagagctatgggcattgagactagtgacatagccgacgtgcccagtgacacttccaaaaatgacaagaaaggaaaggccaacaccgccaaagcaaatgtgacccctcagagtagctctgagctcagaccaaccaccacggctgccctgccgtctggtgtggaagccaagaaaggtattgaacttatccctcaagtaaggatagaagacttaaagcagatgaaggcttacttgaagcatttaaagaaacagcagaaggagctaaattctttaaagaagaaacatgcaaaggaacacagtaccatgcagaagttacactgcacgcaagttgacaaaattgtggcacagtatgacaaagagaagtcgactcatgagaaaatcctagagaaggcaatgaagaagaaagggggaagtaattgtcttgaaatgaagaaagaaacagaaattaaaattcagacgctgacatcagatcacaaatctaaggtcaaggagattgtagcacagcacacaaaggaatggtcagaaatgatcaatactcacagtgctgaggagcaagaaatccgagacctgcacctcagccagcagtgtgagctgctgaaaaagctactcatcaatgcccacgagcagcaaacccagcagctgaaactgtcccatgacagggaaagcaaggaaatgcgagcacaccaggctaagatttctatggaaaatagcaaagccatcagccaagataaatctatcaagaataaagcagaacgggaaaggcgagtcagggagttaaacagcagcaacactaaaaagtttctggaagaaagaaagagacttgccatgaagcagtccaaagaaatggatcagttgaaaaaagtccagcttgaacatctagaattcctagagaaacagaatgagcaggcgaaggagatgcagcagatggtgaaattggaagccgagatggaccgcagaccagcaacagtagtatgaaactccaaaatgcaaactgaagcagcaaacccacaaagcatcaaaagactcactcacaaaacttctgaacacaaactccatggatgaaagctgtttattttgtttcctttatgtgtaaacaagatgatatctgaaaccagagagacttggaatgtctgactgacttctatttaacagcttgagtattgcatttccttggccaaacaaaaatagctacaaatccacaaaaatttactattccagtaaggcagagtccaaccattgataatacaacttaaacatgtttgctataaaataccatcacaagtaaatgagcttggtgtgaacaactcttcctttgtgatgccttaggacatgttgtaactgcaggcaaaacaaacaaaacagtgcattagcaatttcatagca

SEQ ID NO: 163 - protein, 1022 aa, Homo Sapiens [sequence omitted]

SEQ ID NO: 164 - DNA, 5068 bp, Homo Sapiens
  CDS (1038)...(1691)
ggaaaggaggaagaaggagattgtgatggagaaagggggtctgtgaaacgtcaggcacagcacaaaggctttgccacgtaattacaggctcctattaagtcgagatctgccctcccaggggtctccaattttcttgtattccctacaaagcctcctctgcatgccagtttgtgccttttgaagtgccagagagcttcttgatccaactgagaaggaaaaaggagcccagcaagaagagggggagagagagaaggggaaaggggggaacccaccagcaccctccgtcggactcttgaagccttttttttttaattcttaatttttttttttactctttacaaaaagtaaagtgagaatcctgctctctaatacatctgcaagacatcaccctctcctcctgaaactttagtcactcctgagaatccacaggagtgcagagaggggggaacacgttttcttgaagatgttttaaagctggaacaagccttcttctgttggtgcttgaactcttgcctgggaataacttttttaacctttaaaaaaaccattcactttgattcttctctcccaccccttcttctctcttcttctgtttgcctaactcccccgccctgctggcctccgctttcctctctcccccttgttattatttttagtctgtgcgtgtggacacttttggagagttggaagggatttttttctcctgacttgaacatagggtgactttttaatattgtattttactgtggattatctctttggaccgcgccggacttggcctcaggaaatcaaccaatgctgcggaaggcggctggtgcacaacgctctgctctacagaagggggtcccccaccctcttttccaattttttttttttggccttcctctccttccctccctcttcctccctctctctctctctctctccactacccccctctttcttccccactcggctcctctcccccctcgcgcccacagcgtttggtgttgattcgagcgggaagaggggggtgggtgggatcggtgggggagaccatgacctccagctacgggcacgttctggagcggcaaccggcgctgggcggccgcttggacagcccgggcaacctcgacaccctgcaggcgaaaaagaacttctccgtcagtcacctgctagacctggaggaagccggggacatggtggcggcacaggcggatgagaacgtgggcgaggctggccggagcctgctggagtcgccgggactcaccagcggcagcgacaccccgcagcaggacaatgaccagctgaactcagaagaaaaaaagaagagaaagcagcgaaggaataggacaaccttcaatagcagccagctgcaggctttggagcgtgtctttgagcggacacactatcctgatgcttttgtgcgagaagaccttgcccgccgggtgaacctcaccgaggcgagagtgcaggtgtggtttcagaaccgaagagccaagttccgcaggaatgagagagccatgctagccaataaaaacgcttccctcctcaaatcctactcaggagacgtgactgctgtggagcagcccatcgtacctcgtcctgctccgagacccaccgattatctctcctgggggacagcgtctccgtacagatcctcgtccctcccaagatgttgtttacacgaggggcttcataacggattctaacggaagacactgaaaagcgccatggctacttattctgccacatgtgccaacaatagccctgcacagggcatcaacatggccaacagcattgccaacctgagactgaaggccaaggaatatagtttacagaggaaccaggtgccaacagtcaactgaggaaaaaaaataattaaacaggcctaagaagaaatcaaaaaccataagacacctatcctgctctgttatttcttcatctgctggggggaaaaagtaaattacaaacaaacaaacaaagcagaactaaaatattgggaccatggcagagaaaagcaggagaggagcaaaatgaaaattagttaacaaatgttcctcctccctctgggataccaccaccacttgtttctgtgtgtgtttattttgtttttctttcattcatgctttgcttaatgtactccaggcttcttcagataggttcagcccacccacccccatgattgtatgaagttttaaaaaaaactacagcagccaaagaaactatatatatatatatatatatatatatccagaatgattgcctctactgtcctcattgacttgtttgaaccttagtgccttaccctgtcctcttcccagttctctttatagaagctctaggagctttcgaaaagccaaagtctttctgaagaatctgtgctggacagacataattccctttctcattgtctccatctttgttggtcatggtaaggtttttccatcagcctctgaaaaaatagttgtgcacaacatctgctcactggactgtctgatccaatgtaattggctgcgtctggctaattctaagcactaaagtctacatctaagctatagatttaagcttgaagctacagattatatcactatcaccaccacccctcaccctatgcaatcaatcaatcaatcatcttaagttaaagatatttgttgtctttgaatgatttgctgtcacagactatttggtagaagaaatatttttcacctgagagaggaagagaaatttctctagtaacacaaagagtgagttctaaaaggcatgcccacatctctttcgtgccttaaggatagtgagatgcacacttatatatatactgtatatatttatatatttatatatatatttcatatatatatataatattgcaagcttaagtttgcaatttcccaaacaatacaaaaagcaaattacacaccctcaccactgttcttatctctatagtgatgaaacattaattagggatcttgctgcttttctttttctacacgaagttttcattaaagccacagaataattgatagggcagctgtttgagaacaggtcccattttcacattagggctttaaatgaattagaaactatttgaggctataaaaatgtccttgagtttggagcctgagctctggtgaaatgctgatacatctgatctatcatgggaattgcagttagagagagtaaggaataccatttagtcatctatccgttcttcacttagcaggaatatgaaagaaaggcacatgtttaagaggaatacctaaaggtttttctaaattccaacatttaaaaggcaattgtgggctatttttattttttaatattttgaaataaagtttagtgtctagggctgggagccaggactgatcttccatttctttttctttgttcccagccatgcttttgtaacttgccaggtggacttgaccaactacattaccatgctgtgcctcagtttacccatttgtaaaatgggattaataatacttacctacctcacaggggtgttgtgaggctctattcatttgctcctttattctttcctgtattctctgtatgtccagcactttgtagccatgggaggaaagggactataaaagtgtacaatgttaatggaatgatacggtacctgaaagccttgttttctagtaagaaaatgctaccttgctgtacatacttataaccttgtatttggaaatgagaaataggtttatattttcagatctctcaaaaatcacatcatttgaccaaagaataatttaagacacatagaacagatttttttaatttatattttcatcctgaccagcttagttctaataatttttagttgtgagtgattaaaaaactttggatcaattttggtcaaacatgccaactttgtagtctgagtgacaggcaaggatttttgggtttaagatgcacttttagcacacatttgtatttcccttggcatatcagattgagctaatggtgatgttatttcaatctaacagccaccaatctgaaattgtatttcaaatgttgattctgtagttctttaaataataatgaagctcatcttatacattttgctttcaccaattgattccttcttcttttagcccactattaaaacatttcttactgaatggttcatgtaggcttgctgaacagcacgcattacttgcttcctgaagagttcccccattcatccatttgtcccattagttgctgtggattatcaagttttgaaggaactgtacatcccaacagactgaaacattctaagtgaaatgagtataatccaagtaactggtgaactttggaggtttggagcttgaagagaatggctaagaagatttgaattatagggagggaacagaaatcatacatgaaaaggttttactgagaaggggaaaaccttagatagagggacatgtgaaacaaaatcatttgaaattttgattcagacatccatttccagtggcaaacagcaaagcctgaacccataaacccaaatgataggtgaagttgggtggttttatccaatgtctcaagcaagcaatgtctgggaatatcatagagtaacaagtgctggtcagccaaagaaacattcactgctggtgaaccaataccataagcatgtattatctaagcacttgatcaagaaatatacatgttgtacaagctctcaattttgttcatttattatcaaatttttaaaatacaagtttggtatgtgatttggaaaagatgccttctggatcttaagccagttgtcagtggaggtcctcagggctgcaaatgtcaagacataaccctgttcctcaccatcatgataccagatacaggtgaatacataggaactatctgcctgtgtcctcaatctcccttcaaacaagatgctgatttgtagggtacttggcaggttaaattaaaccagaagaggtgacttaataaaaaagggaatgacatttagggtataaagatctcataagaaatgtaatatgtaaattatatcttgctttatgttgtaaaatatacattgtttgcgctagaatagaaatgatttcttttcaataaaaagaaagaaggactctaccatgtc

SEQ ID NO: 165 - protein, 217 aa, Homo Sapiens
MTSSYGHVLERQPALGGRLDSPGNLDTLQAKKNFSVSHLLDLEEAGDMVAAQADENVGEAGRSLLESPGLTSGSDTPQQDNDQLNSEEKKKRKQRRNRTTFNSSQLQALERVFERTHYPDAFVREDLARRVNLTEARVQVWFQNRRAKFRRNERAMLANKNASLLKSYSGDVTAVEQPIVPRPAPRPTDYLSWGTASPYRSSSLPRCCLHEGLHNGF

SEQ ID NO: 166 - DNA, 4996 bp, Homo Sapiens
  CDS (1038)...(1775)
ggaaaggaggaagaaggagattgtgatggagaaagggggtctgtgaaacgtcaggcacagcacaaaggctttgccacgtaattacaggctcctattaagtcgagatctgccctcccaggggtctccaattttcttgtattccctacaaagcctcctctgcatgccagtttgtgccttttgaagtgccagagagcttcttgatccaactgagaaggaaaaaggagcccagcaagaagagggggagagagagaaggggaaaggggggaacccaccagcaccctccgtcggactcttgaagccttttttttttaattcttaatttttttttttactctttacaaaaagtaaagtgagaatcctgctctctaatacatctgcaagacatcaccctctcctcctgaaactttagtcactcctgagaatccacaggagtgcagagaggggggaacacgttttcttgaagatgttttaaagctggaacaagccttcttctgttggtgcttgaactcttgcctgggaataacttttttaacctttaaaaaaaccattcactttgattcttctctcccaccccttcttctctcttcttctgtttgcctaactcccccgccctgctggcctccgctttcctctctcccccttgttattatttttagtctgtgcgtgtggacacttttggagagttggaagggatttttttctcctgacttgaacatagggtgactttttaatattgtattttactgtggattatctctttggaccgcgccggacttggcctcaggaaatcaaccaatgctgcggaaggcggctggtgcacaacgctctgctctacagaagggggtcccccaccctcttttccaattttttttttttggccttcctctccttccctccctcttcctccctctctctctctctctctccactacccccctctttcttccccactcggctcctctcccccctcgcgcccacagcgtttggtgttgattcgagcgggaagaggggggtgggtgggatcggtgggggagaccatgacctccagctacgggcacgttctggagcggcaaccggcgctgggcggccgcttggacagcccgggcaacctcgacaccctgcaggcgaaaaagaacttctccgtcagtcacctgctagacctggaggaagccggggacatggtggcggcacaggcggatgagaacgtgggcgaggctggccggagcctgctggagtcgccgggactcaccagcggcagcgacaccccgcagcaggacaatgaccagctgaactcagaagaaaaaaagaagagaaagcagcgaaggaataggacaaccttcaatagcagccagctgcaggctttggagcgtgtctttgagcggacacactatcctgatgcttttgtgcgagaagaccttgcccgccgggtgaacctcaccgaggcgagagtgcaggtgtggtttcagaaccgaagagccaagttccgcaggaatgagagagccatgctagccaataaaaacgcttccctcctcaaatcctactcaggagacgtgactgctgtggagcagcccatcgtacctcgtcctgctccgagacccaccgattatctctcctgggggacagcgtctccgtacagcgccatggctacttattctgccacatgtgccaacaatagccctgcacagggcatcaacatggccaacagcattgccaacctgagactgaaggccaaggaatatagtttacagaggaaccaggtgccaacagtcaactgaggaaaaaaaataattaaacaggcctaagaagaaatcaaaaaccataagacacctatcctgctctgttatttcttcatctgctggggggaaaaagtaaattacaaacaaacaaacaaagcagaactaaaatattgggaccatggcagagaaaagcaggagaggagcaaaatgaaaattagttaacaaatgttcctcctccctctgggataccaccaccacttgtttctgtgtgtgtttattttgtttttctttcattcatgctttgcttaatgtactccaggcttcttcagataggttcagcccacccacccccatgattgtatgaagttttaaaaaaaactacagcagccaaagaaactatatatatatatatatatatatatatccagaatgattgcctctactgtcctcattgacttgtttgaaccttagtgccttaccctgtcctcttcccagttctctttatagaagctctaggagctttcgaaaagccaaagtctttctgaagaatctgtgctggacagacataattccctttctcattgtctccatctttgttggtcatggtaaggtttttccatcagcctctgaaaaaatagttgtgcacaacatctgctcactggactgtctgatccaatgtaattggctgcgtctggctaattctaagcactaaagtctacatctaagctatagatttaagcttgaagctacagattatatcactatcaccaccacccctcaccctatgcaatcaatcaatcaatcatcttaagttaaagatatttgttgtctttgaatgatttgctgtcacagactatttggtagaagaaatatttttcacctgagagaggaagagaaatttctctagtaacacaaagagtgagttctaaaaggcatgcccacatctctttcgtgccttaaggatagtgagatgcacacttatatatatactgtatatatttatatatttatatatatatttcatatatatatataatattgcaagcttaagtttgcaatttcccaaacaatacaaaaagcaaattacacaccctcaccactgttcttatctctatagtgatgaaacattaattagggatcttgctgcttttctttttctacacgaagttttcattaaagccacagaataattgatagggcagctgtttgagaacaggtcccattttcacattagggctttaaatgaattagaaactatttgaggctataaaaatgtccttgagtttggagcctgagctctggtgaaatgctgatacatctgatctatcatgggaattgcagttagagagagtaaggaataccatttagtcatctatccgttcttcacttagcaggaatatgaaagaaaggcacatgtttaagaggaatacctaaaggtttttctaaattccaacatttaaaaggcaattgtgggctatttttattttttaatattttgaaataaagtttagtgtctagggctgggagccaggactgatcttccatttctttttctttgttcccagccatgcttttgtaacttgccaggtggacttgaccaactacattaccatgctgtgcctcagtttacccatttgtaaaatgggattaataatacttacctacctcacaggggtgttgtgaggctctattcatttgctcctttattctttcctgtattctctgtatgtccagcactttgtagccatgggaggaaagggactataaaagtgtacaatgttaatggaatgatacggtacctgaaagccttgttttctagtaagaaaatgctaccttgctgtacatacttataaccttgtatttggaaatgagaaataggtttatattttcagatctctcaaaaatcacatcatttgaccaaagaataatttaagacacatagaacagatttttttaatttatattttcatcctgaccagcttagttctaataatttttagttgtgagtgattaaaaaactttggatcaattttggtcaaacatgccaactttgtagtctgagtgacaggcaaggatttttgggtttaagatgcacttttagcacacatttgtatttcccttggcatatcagattgagctaatggtgatgttatttcaatctaacagccaccaatctgaaattgtatttcaaatgttgattctgtagttctttaaataataatgaagctcatcttatacattttgctttcaccaattgattccttcttcttttagcccactattaaaacatttcttactgaatggttcatgtaggcttgctgaacagcacgcattacttgcttcctgaagagttcccccattcatccatttgtcccattagttgctgtggattatcaagttttgaaggaactgtacatcccaacagactgaaacattctaagtgaaatgagtataatccaagtaactggtgaactttggaggtttggagcttgaagagaatggctaagaagatttgaattatagggagggaacagaaatcatacatgaaaaggttttactgagaaggggaaaaccttagatagagggacatgtgaaacaaaatcatttgaaattttgattcagacatccatttccagtggcaaacagcaaagcctgaacccataaacccaaatgataggtgaagttgggtggttttatccaatgtctcaagcaagcaatgtctgggaatatcatagagtaacaagtgctggtcagccaaagaaacattcactgctggtgaaccaataccataagcatgtattatctaagcacttgatcaagaaatatacatgttgtacaagctctcaattttgttcatttattatcaaatttttaaaatacaagtttggtatgtgatttggaaaagatgccttctggatcttaagccagttgtcagtggaggtcctcagggctgcaaatgtcaagacataaccctgttcctcaccatcatgataccagatacaggtgaatacataggaactatctgcctgtgtcctcaatctcccttcaaacaagatgctgatttgtagggtacttggcaggttaaattaaaccagaagaggtgacttaataaaaaagggaatgacatttagggtataaagatctcataagaaatgtaatatgtaaattatatcttgctttatgttgtaaaatatacattgtttgcgctagaatagaaatgatttcttttcaataaaaagaaagaaggactctaccatgtc

SEQ ID NO: 167 - protein, 245 aa, Homo Sapiens
MTSSYGHVLERQPALGGRLDSPGNLDTLQAKKNFSVSHLLDLEEAGDMVAAQADENVGEAGRSLLESPGLTSGSDTPQQDNDQLNSEEKKKRKQRRNRTTFNSSQLQALERVFERTHYPDAFVREDLARRVNLTEARVQVWFQNRRAKFRRNERAMLANKNASLLKSYSGDVTAVEQPIVPRPAPRPTDYLSWGTASPYSAMATYSATCANNSPAQGINMANSIANLRLKAKEYSLQRNQVPTVN

SEQ ID NO: 168 - DNA, 5218 bp, Homo Sapiens
  CDS (50)...(1216)
cttccctccccgactgtgcgccgcggctggctcgggttcccgggccgacatgggcgccgccgcgtgggcacggccgctgagcgtgtctttcctgctgctgcttctgccgctcccggggatgcctgcgggctcctgggacccggccggttacctgctctactgcccctgcatggggcgctttgggaaccaggccgatcacttcttgggctctctggcatttgcaaagctgctaaaccgtaccttggctgtccctccttggattgagtaccagcatcacaagcctcctttcaccaacctccatgtgtcctaccagaagtacttcaagctggagcccctccaggcttaccatcgggtcatcagcttggaggatttcatggagaagctggcacccacccactggccccctgagaagcgggtggcatactgctttgaggtggcagcccagcgaagcccagataagaagacgtgccccatgaaggaaggaaacccctttggcccattctgggatcagtttcatgtgagtttcaacaagtcggagctttttacaggcatttccttcagtgcttcctacagagaacaatggagccagagattttctccaaaggaacatccggtgcttgccctgccaggagccccagcccagttccccgtcctagaggaacacaggccactacagaagtacatggtatggtcagacgaaatggtgaagacgggagaggcccagattcatgcccaccttgtccggccctatgtgggcattcatctgcgcattggctctgactggaagaacgcctgtgccatgctgaaggacgggactgcaggctcgcacttcatggcctctccgcagtgtgtgggctacagccgcagcacagcggcccccctcacgatgactatgtgcctgcctgacctgaaggagatccagagggctgtgaagctctgggtgaggtcgctggatgcccagtcggtctacgttgctactgattccgagagttatgtgcctgagctccaacagctcttcaaagggaaggtgaaggtggtgagcctgaagcctgaggtggcccaggtcgacctgtacatcctcggccaagccgaccactttattggcaactgtgtctcctccttcactgcctttgtgaagcgggagcgggacctccaggggaggccgtcttctttcttcggcatggacaggccccctaagctgcgggacgagttctgattctggccggagcaccagaccctctgatcctggagggaccagagtctgagctggtccttccagccaggcctggcagccagaggtgctccgggattgcaaactcctcttctcacctgccaaagatggagaagagtgccagggacccctcaaggagggagacgctccatatcccagggcataggacttgcaggttcctaggagcaggagcatctcccatcgcacgtgctttctgctcttctgggaatttctcacactggcaaagcagtccagcctccgtcttctggtccactctgctctgagcagcctgggatgctgaactcttcagagagatttttttatagagagatttctataattttgatacaaggtcatgactatcctagaactctctgtggtttttgaaaatcattgaattctattaatgtaggtacctaaagtgaccttaactgaatgtggatgaggctggggctggtgtgggtcttttggctgcttttcaaggtgtcccccaatgtggccctcaagagccatccccactgcctggccagagccattgttgtcccctacttcctaggccatttctggggcttgggggatgaatgctgtcctgtgctgtaaacactatgcaaatggaagttatcggttgtggtgctgtgcagcgctctgtgggcgactaagtgccactcacgcagcatgttcctggcaaggagcacataccatcaagccacactatcatggtattgttctcacagtcttttggtggttgatggccactgcaaacctggcaccatcagatctcttctgatctcttgccccagtggggcctggttggtagaatgttggcattcggttgatatccaaagcctgttctcccagccgtcctcctgcagctggagccttcaggccgtattctcacgagggaacgtttgccaaggctctgacctcacagaagatgcccagggcccagaagccatcagaattatcagtggagaagcaccttttgactcttcccttccaatgtaatctctgccaacaccatgaggcttaaggtgctctaagtcatgagtgttttggtctcaaatgctgcagttttaataatctgtgactcctgagagcccatggttttttgaccttgtggttctaaaattccttgtctgacccctgtagatcttttccttgccatgtcacctcccttggcctttgatcctggaaaggtggcagagcctccactgagccaggcccagagctccttgcagtgccttcttccttgtttacctgtgggaggaaacactttttttgtcaggggcagcctggttcagagctcagaggtcacactgtatcaaagatctcaaacagcaaagtcagcatttgctgtatagagctgccacccaactctaagcaggagaaactgtacagaaagggctttgctatttttcccttttgggaaaacaatgaagtgttttaagtcctgggtggactgagagatggtttgcctgtccagacttgctctcaagcctcatccagagaaggagctgcagatgagggagcccgtacactccctgccaccactaggttgtaagcctgtagctggctggctgatttcattttggaattcatttgccatccacagccttacactaggcacacactttagagtctggggctccagtggggcccgcctaattttttttccccccaagacagggccttgctctgtctcccaggctggagtgcagtggcatgatcatggcttactgcagccttgatctcccaggctcaagcgatccttctgcctcagcctctctggtagctgagactgcatgcccagctccaaatcaccttgattcatatcagcagtaataatcacttgtgttctgaaagaaagggcaccagaagttctagcaaaattcagttgtgttctgtgagctagcactttttcctctgacccaattttcttacctataaaatggtgataaaaaccgacaggttgttcaaaggcccagatcagctaaagcatgtatataagagcacgttgtaaacttgaaagagacaaaggcacaaatgtggctgttgattaatttgactgcttctcgttgctcgtcacctccatgccaggcactgtgcttgctaattgctttatgggggcattctcttatttattccccagccctgggaaataggagctgtcattatccttctctttctgcacaaggaaaaattaatgccctgagaattgtcataattttcccaaggctgcccagctggtggtgttaagccagaatttgacctcccagagccagtttccattagctgccatgctctgctgcctctaattcacagaatgcactttctaccctgtgtgccatggagacctcctatggaaaaatgatcagccaccttaccttctactgggtacctgctgtgagtctgcctatgccagaaggattaaggaggggaggttacccaagaaacaaagcctacatgccgcttacagcccccgttggatggttgctcagtacaacagtcttgcattcagcaggtgtttgttcatcacctactatgtgtcaggctctatgctaggtactggggatacaggagagaatcaagcgtaaagtctttgttctcaaggaatttgcattctagaaagtagaagatgtaataaatgtactgtgggacatgttaataagtgctataaagaaatataaagggtttgggagcaaaaagagggagtggatctattttagatgagcccaggtaagacctctctgaagagctgtcatgaaggagggagggagcacattcctggcagagaaaacagcacgtgcaaaggccccgagactggagtgtgttcctgaagagcagccaggaggccagcatggctggagaggcaggcataggcagggaaccgagcagcaggtcagagcaggcgagctgacattctgcagcctggacggccatggcaggaagcttttagttggagagatacaggaagcctcctagggttctgagcagaagaggggcatgagctgattcacattctgaaggacctctctagctggccagtgctgaggaggttggagagagaaagggtgaaagcagagagaccagtgcagggctgttaacagggttgcaggcgagagactggggtgctgggctcccctagactaggactccagtgccctcctctcccaagagacaaaggccattgcattgaaggaggtgggaaatgattagattctgaacatatgtaattatttttcagtctttttcaaagatacaaatatttacatagttttaatcatgtaatatatacaatttaatgtcctagtgttttacttaatagtgtatcatgttttccctgttggtatgtagcctggataaatgctcttaattataaaaaattctgtcgaggagtgttccatagtttattgttttcctattatgagaatttaggccaagtgtggtggctcatgcctgtaatcccagcactttgcgaggccgaggtgggcagatcacttgaggtgaggagttcaagaccagcctggccaacatggtgaattatctctactaaaaatacaaaaaaataataataatagccaggcgtggtggcacatgcctgtattcccagctgcttgggaggctgaggcaggagaatggcttgaacctgggaggtggaggttgcagtgagccgagatggtgccactgcattccagcctgggcaacagagcgagactccatctcaaaaaaaaggagacttcatgtgcccccaatttttcactattgttatttgaaaaaatatttttatttgtaagagtttttctttatttaaaatgttcattaataaagttgttggacgggaagcaaaaaaaaaaagttgtttaagataaattcccagaagtgaatttgttagatcaaacacttaaaactttttgttatggaagaattcaaatataaataaaaaattgtgagtaataaaatgaactcacagtttcaacaatgacccac

SEQ ID NO: 169 - protein, 388 aa, Homo Sapiens
MGAAAWARPLSVSFLLLLLPLPGMPAGSWDPAGYLLYCPCMGRFGNQADHFLGSLAFAKLLNRTLAVPPWIEYQHHKPPFTNLHVSYQKYFKLEPLQAYHRVISLEDFMEKLAPTHWPPEKRVAYCFEVAAQRSPDKKTCPMKEGNPFGPFWDQFHVSFNKSELFTGISFSASYREQWSQRFSPKEHPVLALPGAPAQFPVLEEHRPLQKYMVWSDEMVKTGEAQIHAHLVRPYVGIHLRIGSDWKNACAMLKDGTAGSHFMASPQCVGYSRSTAAPLTMTMCLPDLKEIQRAVKLWVRSLDAQSVYVATDSESYVPELQQLFKGKVKVVSLKPEVAQVDLYILGQADHFIGNCVSSFTAFVKRERDLQGRPSSFFGMDRPPKLRDEF

SEQ ID NO: 170 - DNA, 1559 bp, Homo Sapiens
  CDS (955)...(1338)
ctgcctagcaggcagaggcccctggtgcggaaggtggctcccggcttccaacagacatcaggctccaaggaggcagtcgccagcctgcggagaggccacatccagcggctgaacctgcgctacactcaggtgtcccgccaggagctcagggactacgcgtcctggaacctgagtgtgaacctctacacagtcaacgcaccgtggctcttctccctgctgtggtgtgcgggggtcccatccgtcacctctgacaactcccacaccctgtcccaggtgccttcccccctctggatcatgcccccggacgagtactgtctcatgtgggtcactgccgacctggtctccttcaccctcatcgtgggcatcttcgtgctccagaagtggcgcctgggtggcatacggagctacaaccctgagcagatcatgctgagtgctgcggtgcgccggaccagccgggacgtcagcatcatgaaggagaagcttattttctcagagatcagcgatggtgtagaggtctccgatgtgctctccgtatgttcagacaacagttatgacacatatgccaacagcaccgccacccctgtgggcccccgagggggtggcagccacaccaagaccctcatagagcggagtgggcgttagctgaagacatgtctgtcccacctgtacctgacacagaagctggggagcctaggagagctggtggaagtgtgtctgaactcggagtgctctgggagcgggctccacagcctccttgtgggctccagccccttgtcagccgcagcctctcttgagggggactccctgtctcctgaggcccagctgggccaggactccatcctttcagatgcccctgcaggcctggggctccttctgggaagtatggggcctagggcttggtccccctcttctgaggccctctcctgtatcccgacctggaagctttgatgggtcatgggccatgccataccccctgtggcaatggagtgtgtggatgctcacctgtgccatctgtcctcctgtctgtgccaggaggcacctgagttctctgctgttatcctgccccaagggcctgggccgagcctctacctgaagcaactctgctcttcctgtcagtctcaaagcacaaggaggttcagcccaggaggaagccagctgcaatgtggagacacgtcctcctccccaacccacctcatgccaccgccaaccccctgccccaggagcgggcctgagccacgtcccctaggagcagctggagatggccaaaagagtgagctcaggactactggatcccatgcccaggtgtccagcagacctcaaggcagaagggtcacctaacccaggagtccacagactgatgtgacctcaggttcccacatcagtggccacagggcagggcccacctggtagaagtgttctggatatggccagggtgggtgtgtggctaagtgggcctgaacagagggaacctagggcccttggccaatgtgattaaagctgcatcttgaaaaaaaaaaaaaaaaaaaaaaaaaaaaaaaaaaaaaaaaaaaaaaaaaaac

SEQ ID NO: 171 - protein, 127 aa, Homo Sapiens
MGHAIPPVAMECVDAHLCHLSSCLCQEAPEFSAVILPQGPGPSLYLKQLCSSCQSQSTRRFSPGGSQLQCGDTSSSPTHLMPPPTPCPRSGPEPRPLGAAGDGQKSELRTTGSHAQVSSRPQGRRVT

SEQ ID NO: 172 - DNA, 1573 bp, Homo Sapiens
  CDS (12)...(1097)
ggctgggagagatggcaggcggaagacaccggcgcgtcgtgggcaccctccacctgctgctgctggtggccgccctgccctgggcatccaggggggtcagtccgagtgcctcagcctggccagaggagaagaattaccaccagccagccattttgaattcatcggctcttcggcaaattgcagaaggcaccagtatctctgaaatgtggcaaaatgacttacagccattgctgatagagcgatacccgggatcccctggaagctatgctgctcgtcagcacatcatgcagcgaattcagaggcttcaggctgactgggtcttggaaatagacaccttcttgagtcagacaccctatgggtaccggtctttctcaaatatcatcagcaccctcaatcccactgctaaacgacatttggtcctcgcctgccactatgactccaagtatttttcccactggaacaacagagtgtttgtaggagccactgattcagccgtgccatgtgcaatgatgttggaacttgctcgtgccttagacaagaaactcctttccttaaagactgtttcagactccaagccagatttgtcactccagctgatcttctttgatggtgaagaggcttttcttcactggtctcctcaagattctctctatgggtctcgacacttagctgcaaagatggcatcgaccccgcacccacctggagcgagaggcaccagccaactgcatggcatggatttattggtcttattggatttgattggagctccaaacccaacgtttcccaatttttttccaaactcagccaggtggttcgaaagacttcaagcaattgaacatgaacttcatgaattgggtttgctcaaggatcactctttggaggggcggtatttccagaattacagttatggaggtgtgattcaggatgaccatattccatttttaagaagaggtgttccagttctgcatctgataccgtctcctttccctgaagtctggcacaccatggatgacaatgaagaaaatttggatgaatcaaccattgacaatctaaacaaaatcctacaagtctttgtgttggaatatcttcatttgtaatactctgatttagtttaggataattggttctagaattgaattcaaaagtcaaggcatcatttaaaataatctgatttcagacaaatgctgtgtggaaacatctatcctatagatcatcctattcttatgtgtctttggttatcagatcaattacagaataattgtgttgtgatattgtgtcctaaattgctcattaatttttatttacagattgaaaaagaggcaccgtgtaaagaaaatggcaaaataaatatctttccaaggatcatcatcacgatagctaaacagtacttaaatagcggttggaactaggtagcctttcgaattttatgattttttcatatgtggaaatctattacatgtaatacaaaacaaacatgtagtttgaaggcggtcagatttctttgagaaatctttgtagagttaattttatggaaattaaaatcagaattaaatgctaaaaaaaaaaaaaaaaa

SEQ ID NO: 173 - protein, 361 aa, Homo Sapiens
MAGGRHRRVVGTLHLLLLVAALPWASRGVSPSASAWPEEKNYHQPAILNSSALRQIAEGTSISEMWQNDLQPLLIERYPGSPGSYAARQHIMQRIQRLQADWVLEIDTFLSQTPYGYRSFSNIISTLNPTAKRHLVLACHYDSKYFSHWNNRVFVGATDSAVPCAMMLELARALDKKLLSLKTVSDSKPDLSLQLIFFDGEEAFLHWSPQDSLYGSRHLAAKMASTPHPPGARGTSQLHGMDLLVLLDLIGAPNPTFPNFFPNSARWFERLQAIEHELHELGLLKDHSLEGRYFQNYSYGGVIQDDHIPFLRRGVPVLHLIPSPFPEVWHTMDDNEENLDESTIDNLNKILQVFVLEYLHL

SEQ ID NO: 174 - DNA, 3969 bp, Homo Sapiens
  CDS (129)...(716)
ggcccagaaatagcagcggcgcgttcccctcggcgcagagcgacgggcagaggcgagagacgccgcggggccgggcggcggccccggaaggatgctgctgagccccggcactgcctggctgcgagcacatgatggcgatacgggagctcaaagtgtgccttctcggggacactggggttgggaaatcaagcatcgtgtgtcgatttgtccaggatcactttgaccacaacatcagccctactattggggcatcttttatgaccaaaactgtgccttgtggaaatgaacttcacaagttcctcatctgggacactgctggtcaggaacggtttcattcattggctcccatgtactatcgaggctcagctgcagctgttatcgtgtatgatattaccaagcaggattcattttataccttgaagaaatgggtcaaggagctgaaagaacatggtccagaaaacattgtaatggccatcgctggaaacaagtgcgacctctcagatattagggaggttcccctgaaggatgctaaggaatacgctgaatccataggtgccatcgtggttgagacaagtgcaaaaaatgctattaatatcgaagagctctttcaaggaatcagccgccagatcccacccttggacccccatgaaaatggaaacaatggaacaatcaaagttgagaagccaaccatgcaagccagccgccggtgctgttgacccaagggccgtggtccacggtacttgaagaagccagagcccacatcctgtgcactgctgaaggaccctacgctcggtggcctggcacctcactttgagaagagtgagcacactggctttgcatcctggaagacctgcagggggcggggcaggaaatgtacctgaaaaggattttagaaaaccctgggaaaacccaccacaccaccacaaaatggcctttagtgtatgaaatgcacatggaggggatgtagttgcatttttgctaaaaaaaaaaaaaaacctttaaaaattgttggatgtgtacaaaagtcttactgccttattatgtgtatgggattctaaagtggcattccacttggatttcctgtgctacctatcccaaattcccagtaactacttcagtgtcattgcctttgttacctaaccaaccttcactgaaaggcaaatttagttcaggaggttagtttttagctagctttggaagtaagcctttatttattactttttggaggaaatcagagaagtgtcaatggaccgtcactcagactgagacttgagttattacagaagccaggaaaagtgtattagaaactgttgtctacaccacttttaattggtgaacaatttttctaagttatggtcatatatacccaaacaaaccaaatcaaactaaattactgcatataattttgggattgggtggcctagtttgaaagagtgatttaagtaatcactatgtaagtggtgagagatgcaggacatacacattattcaagagaccacctgacatgcatctcctccgcaggaatacattcgtcctctcttagagaagtttaacgcacatagtattattttactaagagaatatctcttggtgtcatatctaggggaagagaattaactagaattaaatttaatgtttgaatctaaatcattgggcaaacttctaataataacaattaataataggttacaggaaagccagccagaggaagtgtcagcactttaaaattctagaccccaaaaaactacaaaatcagaaaaagtatttttatgtttctagcttgaggagaagggctttagggctaaccagaggtctgaccctagaatgccaaggaactgagaatgggctccgatgaaaaccttccttttcagattccctgtctgctcaattaaagatgtttgaatccaaaggaagtcaaggaagaaaaagcatggaaaggaagagaactgattcctactgaaaattcaaattctattaccattctaactttcataaaaagttgggatcaagaagcagctgatttcctgccagggcttatattagggggtgattcttaaaggacattaggattggtgctcagaaatggttaatcatgctgtgtgctagccagggccagctggtaccttctttgccatgagcattcaagggacagctaacctttattgacaatctatattgcaaaagtcaggaaagaggttgtgagctgattggattaaagacctggcacttcagtaactcagcacgcttccacttcactcaacttaagagagttcattgacagtgttaggatgtgaaggctgggaaacacttattttgcttcaagagttccacttggctctcccaaataggtacctcaaaaactgttagcaagcggcatttggatgtcttgacaggggctttgcagggatttttagggttttttccacattgtccacattaatggttggcatgattgtgcttgcaggccaagaaatgatcataccccttgccaaaggtaaaaaaaaaaaaaaaaaaatgagttgaaaattgaagtgacctctttccagctgacttgcaggcttattttgtaacctttcctcatccagttttccctgagaacctgggtttatctctagatagctgttcaggttttttagctgaggggtaagtatcctagctgagagttttgcatctttgggctgggtttgcagtggttgtgttttgcataaaatgtctagtctttgccacagatagtgagctacccactaatgagcccatggttttatttcagaagcacatgagggtgtgaaaccactctgttacctttctgtattgtcttagctattcaagccagtcagaggataatatatatattctcatcagcactcagagtagtcagtgaagagagtaggatcacacttggggcacaccaggattcacataaacattgtatcttctctgtggatgctcaggccttgtctacaatgaggctttacaaccttccttgtttggctcgggattacttcctggctgtctaataattgaaccataaccatgtaatattatgtaaaggcctggaaattactgttgctaaaaaaagtcatgtagtttcatgtagtgtagcatccttggcatcgttttccaaaatttgttccttctcccttttttttttctttcgtgtgtggcatgagtgtgtatctgtgtaaatatgattgtatatgtgttactccgatatgtaatccatttcactggctgagtttggcccctagccatgtgttaatataaagtagggcatgggcttcccaatggaaatctctgagaatgacagtggagttgtgcaagcattttacattgccacataattgacttgccattttatggttaaaaacgggcacattaggcagttgaatatgacgttaccttgcagactaaaaggttgaaggcccgaaactaacttttagctaacaataagggctgtgccccaatggaaactgagttcattttctgagaaaggtttggatgactgaaatatttcctctacagtcaaggactttggcatgcggtggctgaaactgagcttttttgtgtgggctccagttctcactgttctgcaatgctcatggcaagttgaatggtgagctagcttataaattaaagagctctgaactgtattcagaccgactgggtatctagcttactgttttaacatcattgttgaaaccagaccctgtagtccagtggtgctgccctgttgtgcaaactgctcctttttctcgtgtttttgtaaagagcttccatctgggctggacccagttcttgcacatacaagacaccgctgcagtcagctaggacctttccgccatgtattctattctgtagtaaagcatttccatcaacaatgcctaattgtatctgttatttttggtttaacacacactgattcatactaataaatattttcagttttaaaaaaaaaaaaaaaaaaaaaaa

SEQ ID NO: 175 - protein, 195 aa, Homo Sapiens
MMAIRELKVCLLGDTGVGKSSIVCRFVQDHFDHNISPTIGASFMTKTVPCGNELHKFLIWDTAGQERFHSLAPMYYRGSAAAVIVYDITKQDSFYTLKKWVKELKEHGPENIVMAIAGNKCDLSDIREVPLKDAKEYAESIGAIVVETSAKNAINIEELFQGISRQIPPLDPHENGNNGTIKVEKPTMQASRRCC

SEQ ID NO: 176 - DNA, 595 bp, Homo Sapiens
  CDS (121)...(438)
gggcaaggctgggccgggaagggcgtgggttgaggagaggctccagacccgcacgccgcgcgcacagagctctcagcgccgctcccagccacagcctcccgcgcctcgctcagctccaacatggcaaaaatctccagccctacagagactgagcggtgcatcgagtccctgattgctgtcttccagaagtatgctggaaaggatggttataactacactctctccaagacagagttcctaagcttcatgaatacagaactagctgccttcacaaagaaccagaaggaccctggtgtccttgaccgcatgatgaagaaactggacaccaacagtgatggtcagctagatttctcagaatttcttaatctgattggtggcctagctatggcttgccatgactccttcctcaaggctgtcccttcccagaagcggacctgaggaccccttggccctggccttcaaacccaccccctttccttccagcctttctgtcatcatctccacagcccacccatcccctgagcacactaaccacctcatgcaggccccacctgccaatagtaataaagcaatgtcacttttttaaaacatgaaa

SEQ ID NO: 177 - protein, 105 aa, Homo Sapiens
MAKISSPTETERCIESLIAVFQKYAGKDGYNYTLSKTEFLSFMNTELAAFTKNQKDPGVLDRMMKKLDTNSDGQLDFSEFLNLIGGLAMACHDSFLKAVPSQKRT

SEQ ID NO: 178 - DNA, 784 bp, Homo Sapiens
  CDS (80)...(361)
ggcacgagggcaaagagtagtcagtcccttcttggctctgctgacactcgagcccacattccatcacctgctcccaatcatgcaggtctccactgctgcccttgccgtcctcctctgcaccatggctctctgcaaccaggtcctctctgcaccacttgctgctgacacgccgaccgcctgctgcttcagctacacctcccggcagattccacagaatttcatagctgactactttgagacgagcagccagtgctccaagcccagtgtcatcttcctaaccaagagaggccggcaggtctgtgctgaccccagtgaggagtgggtccagaaatacgtcagtgacctggagccgagtgcctgaggggtccagaagcttcgaggcccagcgacctcagtgggcccagtggggaggagcaggagcctgagccttgggaacatgcgtgtgacctccacagctacctcttctatggactggttattgccaaacagccacactgtgggactcttcttaacttaaattttaatttatttatactatttagtttttataatttatttttgatttcacagtgtgtttgtgattgtttgctctgagagttccccctgtcccctccaccttccctcacagtgtgtctggtgacaaccgagtggctgtcatcggcctgtgtaggcagtcatggcaccaaagccaccagactgacaaatgtgtatcagatgcttttgttcagggctgtgatcggcctggggaaataataaagatgttcttttaaacggtaaaaaaaaa

SEQ ID NO: 179 - protein, 93 aa, Homo Sapiens
MQVSTAALAVLLCTMALCNQVLSAPLAADTPTACCFSYTSRQIPQNFIADYFETSSQCSKPSVIFLTKRGRQVCADPSEEWVQKYVSDLEPSA

SEQ ID NO: 180 - DNA, 1172 bp, Homo Sapiens
  CDS (67)...(363)
gagacattcctcaattgcttagacatattctgagcctacagcagaggaacctccagtctcagcaccatgaatcaaactgcgattctgatttgctgccttatctttctgactctaagtggcattcaaggagtacctctctctagaaccgtacgctgtacctgcatcagcattagtaatcaacctgttaatccaaggtctttagaaaaacttgaaattattcctgcaagccaattttgtccacgtgttgagatcattgctacaatgaaaaagaagggtgagaagagatgtctgaatccagaatcgaaggccatcaagaatttactgaaagcagttagcaaggaaatgtctaaaagatctccttaaaaccagaggggagcaaaatcgatgcagtgcttccaaggatggaccacacagaggctgcctctcccatcacttccctacatggagtatatgtcaagccataattgttcttagtttgcagttacactaaaaggtgaccaatgatggtcaccaaatcagctgctactactcctgtaggaaggttaatgttcatcatcctaagctattcagtaataactctaccctggcactataatgtaagctctactgaggtgctatgttcttagtggatgttctgaccctgcttcaaatatttccctcacctttcccatcttccaagggtactaaggaatctttctgctttggggtttatcagaattctcagaatctcaaataactaaaaggtatgcaatcaaatctgctttttaaagaatgctctttacttcatggacttccactgccatcctcccaaggggcccaaattctttcagtggctacctacatacaattccaaacacatacaggaaggtagaaatatctgaaaatgtatgtgtaagtattcttatttaatgaaagactgtacaaagtataagtcttagatgtatatatttcctatattgttttcagtgtacatggaataacatgtaattaagtactatgtatcaatgagtaacaggaaaattttaaaaatacagatagatatatgctctgcatgttacataagataaatgtgctgaatggttttcaaataaaaatgaggtactctcctggaaatattaagaaagactatctaaatgttgaaagatcaaaaggttaataaagtaattataact

SEQ ID NO: 181 - protein, 98 aa, Homo Sapiens
MNQTAILICCLIFLTLSGIQGVPLSRTVRCTCISISNQPVNPRSLEKLEIIPASQFCPRVEIIATMKKKGEKRCLNPESKAIKNLLKAVSKEMSKRSP

SEQ ID NO: 182 - DNA, 1337 bp, Homo Sapiens
  CDS (28)...(1179)
ctggcgtcccctttccggccggtccccatggaggcgctggggaagctgaagcagttcgatgcctaccccaagactttggaggacttccgggtcaagacctgcgggggcgccaccgtgaccattgtcagtggccttctcatgctgctactgttcctgtccgagctgcagtattacctcaccacggaggtgcatcctgagctctacgtggacaagtcgcggggagataaactgaagatcaacatcgatgtactttttccgcacatgccttgtgcctatctgagtattgatgccatggatgtggccggagaacagcagctggatgtggaacacaacctgttcaagcaacgactagataaagatggcatccccgtgagctcagaggctgagcggcatgagcttgggaaagtcgaggtgacggtgtttgaccctgactccctggaccctgatcgctgtgagagctgctatggtgctgaggcagaagatatcaagtgctgtaacacctgtgaagatgtgcgggaggcatatcgccgtagaggctgggccttcaagaacccagatactattgagcagtgccggcgagagggcttcagccagaagatgcaggagcagaagaatgaaggctgccaggtgtatggcttcttggaagtcaataaggtggccggaaacttccactttgcccctgggaagagcttccagcagtcccatgtgcacgtccatgacttgcagagctttggccttgacaacatcaacatgacccactacatccagcacctgtcatttggggaggactatccaggcattgtgaaccccctggaccacaccaatgtcactgcgccccaagcctccatgatgttccagtactttgtgaaggtggtgcccactgtgtacatgaaggtggacggagaggtactgaggacaaatcagttctctgtgaccagacatgagaaggttgccaatgggctgttgggcgaccaaggccttcccggagtcttcgtcctctatgagctctcgcccatgatggtgaagctgacggagaagcacaggtccttcacccacttcctgacaggtgtgtgcgccatcattgggggcatgttcacagtggctggactcatcgattcgctcatctaccactcagcacgagccatccagaagaaaattgatctagggaagacaacgtagtcaccctcggtgcttcctctgtctcctctttctccctggcctgtggttgtcccccagcctctgccaccctccacctcctcggtcagccccagccccaggttgataaatctattgattgattgtgatagtaaaaaaaaaaaaaaaaaaaaaaaaaaaaa

SEQ ID NO: 183 - protein, 383 aa, Homo Sapiens
MEALGKLKQFDAYPKTLEDFRVKTCGGATVTIVSGLLMLLLFLSELQYYLTTEVHPELYVDKSRGDKLKINIDVLFPHMPCAYLSIDAMDVAGEQQLDVEHNLFKQRLDKDGIPVSSEAERHELGKVEVTVFDPDSLDPDRCESCYGAEAEDIKCCNTCEDVREAYRRRGWAFKNPDTIEQCRREGFSQKMQEQKNEGCQVYGFLEVNKVAGNFHFAPGKSFQQSHVHVHDLQSFGLDNINMTHYIQHLSFGEDYPGIVNPLDHTNVTAPQASMMFQYFVKVVPTVYMKVDGEVLRTNQFSVTRHEKVANGLLGDQGLPGVFVLYELSPMMVKLTEKHRSFTHFLTGVCAIIGGMFTVAGLIDSLIYHSARAIQKKIDLGKTT

SEQ ID NO: 184 - DNA, 2129 bp, Homo Sapiens
  CDS (210)...(1406)
ggcacgagggctgcccgggctgcgcggcgtctgcaggcgccaccgctgcctctttccggctgtgaccctcctcgccggcgccgcttggctgcgtcctccgactccccgcgccgccgagaccaggctcccgctccggttgcggccgcaccgccctccgcggccgccccctggggatccagcgagcgcggtcgtccttggtggaaggaaccatgaactggcatctccccctcttcctcttggcctctgtgacgctgccttccatctgctcccacttcaatcctctgtctctcgaggaactaggctccaacacggggatccaggttttcaatcagattgtgaagtcgaggcctcatgacaacatcgtgatctctccccatgggattgcgtcggtcctggggatgcttcagctgggggcggacggcaggaccaagaagcagctcgccatggtgatgagatacggcgtaaatggagttggtaaaatattaaagaagatcaacaaggccatcgtctccaagaagaataaagacattgtgacagtggctaacgccgtgtttgttaagaatgcctctgaaattgaagtgccttttgttacaaggaacaaagatgtgttccagtgtgaggtccggaatgtgaactttgaggatccagcctctgcctgtgattccatcaatgcatgggttaaaaatgaaaccagggatatgattgacaatctgctgtccccagatcttattgatggtgtgctcaccagactggtcctcgtcaacgcagtgtatttcaagggtctgtggaaatcacggttccaacccgagaacacaaagaaacgcactttcgtggcagccgacgggaaatcctatcaagtgccaatgctggcccagctctccgtgttccggtgtgggtcgacaagtgcccccaatgatttatggtacaacttcattgaactgccctaccacggggaaagcatcagcatgctgattgcactgccgactgagagctccactccgctgtctgccatcatcccacacatcagcaccaagaccatagacagctggatgagcatcatggtgcccaagagggtgcaggtgatcctgcccaagttcacagctgtagcacaaacagatttgaaggagccgctgaaagttcttggcattactgacatgtttgattcatcaaaggcaaattttgcaaaaataacaacagggtcagaaaacctccatgtttctcatatcttgcaaaaagcaaaaattgaagtcagtgaagatggaaccaaagcttcagcagcaacaactgcaattctcattgcaagatcatcgcctccctggtttatagtagacagaccttttctgtttttcatccgacataatcctacaggtgctgtgttattcatggggcagataaacaaaccctgaagagtatacaaaagaaaccatgcaaagcaacgactactttgctacgaagaaagactcctttcctgcatctttcatagttctgttaaatatttttgtacatcgcttctttttcaaaactagttcttaggaacagactcgatgcaagtgtttctgttctgggaggtattggagggaaaaaacagcaggatggctggaacactgtactgaggaatgaatagaaaggcttccagatgtctaaaagattctttaaactactgaactgttacctaggttaacaaccctgttgagtatttgctgtttgtccagttcaggaatttttgttttgttttgtctatatgtgcggcttttcagaagaaatttaatcagtgtgacagaaaaaaaaaatgttttatggtagcttttactttttatgaaaaaaaaattatttgccttttaaattcttttcccccatccccctccaaagtcttgatagcaagcgttattttgggggtagaaacggtgaaatctctagcctctttgtgtttttgttgttgttgttgttgttgttttatataatgcatgtattcactaaaataaaatttaaaaaactcctgtcttgctagacaaggttgctgttgtgcagtgtgcctgtcactactggtctgtactccttggatttgcatttttgtattttgtacaaagtaaaaataaactgttatgagtagtaaaaaaaaaaaaaaaaaa

SEQ ID NO: 185 - protein, 398 aa, Homo Sapiens
MNWHLPLFLLASVTLPSICSHFNPLSLEELGSNTGIQVFNQIVKSRPHDNIVISPHGIASVLGMLQLGADGRTKKQLAMVMRYGVNGVGKILKKINKAIVSKKNKDIVTVANAVFVKNASEIEVPFVTRNKDVFQCEVRNVNFEDPASACDSINAWVKNETRDMIDNLLSPDLIDGVLTRLVLVNAVYFKGLWKSRFQPENTKKRTFVAADGKSYQVPMLAQLSVFRCGSTSAPNDLWYNFIELPYHGESISMLIALPTESSTPLSAIIPHISTKTIDSWMSIMVPKRVQVILPKFTAVAQTDLKEPLKVLGITDMFDSSKANFAKITTGSENLHVSHILQKAKIEVSEDGTKASAATTAILIARSSPPWFIVDRPFLFFIRHNPTGAVLFMGQINKP

SEQ ID NO: 186 - DNA, 2047 bp, Homo Sapiens
  CDS (88)...(1344)
gtcgcggctcgagagcgagagtcacgtcccggcgctagcccagcccgacccaggcccaccgtggtgcacgcaaaccacttcctggccatgcgctccctcctgcttctcagcgccttctgcctcctggaggcggccctggccgccgaggtgaagaaacctgcagccgcagcagctcctggcactgcggagaagttgagccccaaggcggccacgcttgccgagcgcagcgccggcctggccttcagcttgtaccaggccatggccaaggaccaggcagtggagaacatcctggtgtcacccgtggtggtggcctcgtcgctggggctcgtgtcgctgggcggcaaggcgaccacggcgtcgcaggccaaggcagtgctgagcgccgagcagctgcgcgacgaggaggtgcacgccggcctgggcgagctgctgcgctcactcagcaactccacggcgcgcaacgtgacctggaagctgggcagccgactgtacggacccagctcagtgagcttcgctgatgacttcgtgcgcagcagcaagcagcactacaactgcgagcactccaagatcaacttccgcgacaagcgcaggccgctgcagtccatcaacgagtgggccgcgcagaccaccgacggcaagctgcccgaggtcaccaaggacgtggagcgcacggacggcgccctgttagtcaacgccatgttcttcaagccacactgggatgagaaattccaccacaagatggtggacaaccgtggcttcatggtgactcggtcctataccgtgggtgtcatgatgatgcaccggacaggcctctacaactactacgacgacgagaaggaaaagctgcaaatcgtggagatgcccctggcccacaagctctccagcctcatcatcctcatgccccatcacgtggagcctctcgagcgccttgaaaagctgctaaccaaagagcagctgaagatctggatggggaagatgcagaagaaggctgttgccatctccttgcccaagggtgtggtggaggtgacccatgacctgcagaaacacctggctgggctgggcctgactgaggccattgacaagaacaaggccgacttgtcacgcatgtcaggcaagaaggacctgtacctggccagcgtgttccacgccaccgcctttgagttggacacagatggcaacccctttgaccaggacatctacgggcgcgaggagctgcgcagccccaagctgttctacgccgaccaccccttcatcttcctagtgcgggacacccaaagcggctccctgctattcattgggcgcctggtccggcctaagggtgacaagatgcgagacgagttatagggcctcagggtgcacacaggatggcaggaggcatccaaaggctcctgagacacatgggtgctattggggttgggggggaggtgaggtaccagccttggatactccatggggtgggggtggaaaagcagaccggggttcccgtgtgcctgagcggaccttcccagctagaattcactccacttggacatgggccccagataccatgatgctgagcccggaaactccacatcctgtgggacctgggccatagtcattctgcctgccctgaaagtcccagatcaagcctgcctcaatcagtattcatatttatagccaggtaccttctcacctgtgagaccaaattgagctaggggggtcagccagccctcttctgacactaaaacacctcagctgcctccccagctctatcccaacctctcccaactataaaactaggtgctgcagcccctgggaccaggcacccccagaatgacctggccgcagtgaggcggattgagaaggagctcccaggaggggcttctgggcagactctggtcaagaagcatcgtgtctggcgttgtggggatgaactttttgttttgtttcttccttttttagttcttcaaagatagggagggaagggggaacatgagcctttgttgctatcaatccaagaacttatttgtacattttttttttcaataaaacttttccaatgacattt

SEQ ID NO: 187 - protein, 418 aa, Homo Sapiens [sequence omitted]

SEQ ID NO: 188 - DNA, 2820 bp, Homo Sapiens
  CDS (238)...(1278)
ggcgggttcgcgccccgaaggctgagagctggcgctgctcgtgccctgtgtgccagacggcggagctccgcggccggaccccgcggccccgctttgctgccgactggagtttgggggaagaaactctcctgcgccccagaagatttcttcctcggcgaagggacagcgaaagatgagggtggcaggaagagaaggcgctttctgtctgccggggtcgcagcgcgagagggcagtgccatgttcctctccatcctagtggcgctgtgcctgtggctgcacctggcgctgggcgtgcgcggcgcgccctgcgaggcggtgcgcatccctatgtgccggcacatgccctggaacatcacgcggatgcccaaccacctgcaccacagcacgcaggagaacgccatcctggccatcgagcagtacgaggagctggtggacgtgaactgcagcgccgtgctgcgcttcttcttctgtgccatgtacgcgcccatttgcaccctggagttcctgcacgaccctatcaagccgtgcaagtcggtgtgccaacgcgcgcgcgacgactgcgagcccctcatgaagatgtacaaccacagctggcccgaaagcctggcctgcgacgagctgcctgtctatgaccgtggcgtgtgcatttcgcctgaagccatcgtcacggacctcccggaggatgttaagtggatagacatcacaccagacatgatggtacaggaaaggcctcttgatgttgactgtaaacgcctaagccccgatcggtgcaagtgtaaaaaggtgaagccaactttggcaacgtatctcagcaaaaactacagctatgttattcatgccaaaataaaagctgtgcagaggagtggctgcaatgaggtcacaacggtggtggatgtaaaagagatcttcaagtcctcatcacccatccctcgaactcaagtcccgctcattacaaattcttcttgccagtgtccacacatcctgccccatcaagatgttctcatcatgtgttacgagtggcgttcaaggatgatgcttcttgaaaattgcttagttgaaaaatggagagatcagcttagtaaaagatccatacagtgggaagagaggctgcaggaacagcggagaacagttcaggacaagaagaaaacagccgggcgcaccagtcgtagtaatccccccaaaccaaagggaaagcctcctgctcccaaaccagccagtcccaagaagaacattaaaactaggagtgcccagaagagaacaaacccgaaaagagtgtgagctaactagtttccaaagcggagacttccgacttccttacaggatgaggctgggcattgcctgggacagcctatgtaaggccatgtgccccttgccctaacaactcactgcagtgctcttcatagacacatcttgcagcatttttcttaaggctatgcttcagtttttctttgtaagccatcacaagccatagtggtaggtttgccctttggtacagaaggtgagttaaagctggtggaaaaggcttattgcattgcattcagagtaacctgtgtgcatactctagaagagtagggaaaataatgcttgttacaattcgacctaatatgtgcattgtaaaataaatgccatatttcaaacaaaacacgtaatttttttacagtatgttttattaccttttgatatctgttgttgcaatgttagtgatgttttaaaatgtgatgaaaatataatgtttttaagaaggaacagtagtggaatgaatgttaaaagatctttatgtgtttatggtctgcagaaggatttttgtgatgaaaggggattttttgaaaaattagagaagtagcatatggaaaattataatgtgtttttttaccaatgacttcagtttctgtttttagctagaaacttaaaaacaaaaataataataaagaaaaataaataaaaaggagaggcagacaatgtctggattcctgttttttggttacctgatttccatgatcatgatgcttcttgtcaacaccctcttaagcagcaccagaaacagtgagtttgtctgtaccattaggagttaggtactaattagttggctaatgctcaagtattttatacccacaagagaggtatgtcactcatcttacttcccaggacatccaccctgagaataatttgacaagcttaaaaatggccttcatgtgagtgccaaattttgtttttcttcatttaaatattttctttgcctaaatacatgtgagaggagttaaatataaatgtacagagaggaaagttgagttccacctctgaaatgagaattacttgacagttgggatactttaatcagaaaaaaagaacttatttgcagcattttatcaacaaatttcataattgtggacaattggaggcatttattttaaaaaacaattttattggccttttgctaacacagtaagcatgtattttataaggcattcaataaatgcacaacgcccaaaggaaataaaatcctatctaatcctactctccactacacagaggtaatcactattagtattttggcatattattctccaggtgtttgcttatgcacttataaaatgatttgaacaaataaaactaggaacctgtatacatgtgtttcataacctgcctcctttgcttggccctttattgagataagttttcctgtcaagaaagcagaaaccatctcatttctaacagctgtgttatattccatagtatgcattactcaacaaactgttgtgctattggatacttaggtggtttcttcactgacaatactgaataaacatctcaccggaattc

SEQ ID NO: 189 - protein, 346 aa, Homo Sapiens
MFLSILVALCLWLHLALGVRGAPCEAVRIPMCRHMPWNITRMPNHLHHSTQENAILAIEQYEELVDVNCSAVLRFFFCAMYAPICTLEFLHDPIKPCKSVCQRARDDCEPLMKMYNHSWPESLACDELPVYDRGVCISPEAIVTDLPEDVKWIDITPDMMVQERPLDVDCKRLSPDRCKCKKVKPTLATYLSKNYSYVIHAKIKAVQRSGCNEVTTVVDVKEIFKSSSPIPRTQVPLITNSSCQCPHILPHQDVLIMCYEWRSRMMLLENCLVEKWRDQLSKRSIQWEERLQEQRRTVQDKKKTAGRTSRSNPPKPKGKPPAPKPASPKKNIKTRSAQKRTNPKRV

SEQ ID NO: 190 - DNA, 6868 bp, Homo Sapiens
  CDS (165)...(3803)
ggtggcctctgtggccgtccaggctagcggcggcccgcaggcggcggggagaaagactctctcacctggtcttgcggctgtggccaccgccggccaggggtgtggagggcgtgctgccggagacgtccgccgggctctgcagttccgccgggggtcgggcagctatggagccgcggcccacggcgccctcctccggcgccccgggactggccggggtcggggagacgccgtcagccgctgcgctggccgcagccagggtggaactgcccggcacggctgtgccctcggtgccggaggatgctgcgcccgcgagccgggacggcggcggggtccgcgatgagggccccgcggcggccggggacgggctgggcagacccttggggcccaccccgagccagagccgtttccaggtggacctggtttccgagaacgccgggcgggccgctgctgcggcggcggcggcggcggcggcagcggcggcggctggtgctggggcgggggccaagcagacccccgcggacggggaagccagcggcgagagcgagccagctaaaggcagcgaggaagccaagggccgcttccgcgtgaacttcgtggacccagctgcctcctcgtcggctgaagacagcctgtcagatgctgccggggtcggagtcgacgggcccaacgtgagcttccagaacggcggggacacggtgctgagcgagggcagcagcctgcactccggcggcggcggcggcagtgggcaccaccagcactactattatgatacccacaccaacacctactacctgcgcaccttcggccacaacaccatggacgctgtgcccaggatcgatcactaccggcacacagccgcgcagctgggcgagaagctgctccggcctagcctggcggagctccacgacgagctggaaaaggaaccttttgaggatggctttgcaaatggggaagaaagtactccaaccagagatgctgtggtcacgtatactgcagaaagtaaaggagtcgtgaagtttggctggatcaagggtgtattagtacgttgtatgttaaacatttggggtgtgatgcttttcattagattgtcatggattgtgggtcaagctggaataggtctatcagtccttgtaataatgatggccactgttgtgacaactatcacaggattgtctacttcagcaatagcaactaatggatttgtaagaggaggaggagcatattatttaatatctagaagtctagggccagaatttggtggtgcaattggtctaatcttcgcctttgccaacgctgttgcagttgctatgtatgtggttggatttgcagaaaccgtggtggagttgcttaaggaacattccatacttatgatagatgaaatcaatgatatccgaattattggagccattacagtcgtgattcttttaggtatctcagtagctggaatggagtgggaagcaaaagctcagattgttcttttggtgatcctacttcttgctattggtgatttcgtcataggaacatttatcccactggagagcaagaagccaaaagggttttttggttataaatctgaaatatttaatgagaactttgggcccgattttcgagaggaagagactttcttttctgtatttgccatcttttttcctgctgcaactggtattctggctggagcaaatatctcaggtgatcttgcagatcctcagtcagccatacccaaaggaacactcctagccattttaattactacattggtttacgtaggaattgcagtatctgtaggttcttgtgttgttcgagatgccactggaaacgttaatgacactatcgtaacagagctaacaaactgtacttctgcagcctgcaaattaaactttgatttttcatcttgtgaaagcagtccttgttcctatggcctaatgaacaacttccaggtaatgagtatggtgtcaggatttacaccactaatttctgcaggtatattttcagccactctttcttcagcattagcatccctagtgagtgctcccaaaatatttcaggctctatgtaaggacaacatctacccagctttccagatgtttgctaaaggttatgggaaaaataatgaacctcttcgtggctacatcttaacattcttaattgcacttggattcatcttaattgctgaactgaatgttattgcaccaattatctcaaacttcttccttgcatcatatgcattgatcaatttttcagtattccatgcatcacttgcaaaatctccaggatggcgtcctgcattcaaatactacaacatgtggatatcacttcttggagcaattctttgttgcatagtaatgttcgtcattaactggtgggctgcattgctaacatatgtgatagtccttgggctgtatatttatgttacctacaaaaaaccagatgtgaattggggatcctctacacaagccctgacttacctgaatgcactgcagcattcaattcgtctttctggagtggaagaccacgtgaaaaactttaggccacagtgtcttgttatgacaggtgctccaaactcacgtccagctttacttcatcttgttcatgatttcacaaaaaatgttggtttgatgatctgtggccatgtacatatgggtcctcgaagacaagccatgaaagagatgtccatcgatcaagccaaatatcagcgatggcttattaagaacaaaatgaaggcattttatgctccagtacatgcagatgacttgagagaaggtgcacagtatttgatgcaggctgctggtcttggtcgtatgaagccaaacacacttgtccttggatttaagaaagattggttgcaagcagatatgagggatgtggatatgtatataaacttatttcatgatgcttttgacatacaatatggagtagtggttattcgcctaaaagaaggtctggatatatctcatcttcaaggacaagaagaattattgtcatcacaagagaaatctcctggcaccaaggatgtggtagtaagtgtggaatatagtaaaaagtccgatttagatacttccaaaccactcagtgaaaaaccaattacacacaaagttgaggaagaggatggcaagactgcaactcaaccactgttgaaaaaagaatccaaaggccctattgtgcctttaaatgtagctgaccaaaagcttcttgaagctagtacacagtttcagaaaaaacaaggaaagaatactattgatgtctggtggctttttgatgatggaggtttgaccttattgataccttaccttctgacgaccaagaaaaaatggaaagactgtaagatcagagtattcattggtggaaagataaacagaatagaccatgaccggagagcgatggctactttgcttagcaagttccggatagacttttctgatatcatggttctaggagatatcaataccaaaccaaagaaagaaaatattatagcttttgaggaaatcattgagccatacagacttcatgaagatgataaagagcaagatattgcagataaaatgaaagaagatgaaccatggcgaataacagataatgagcttgaactttataagaccaagacataccggcagatcaggttaaatgagttattaaaggaacattcaagcacagctaatattattgtcatgagtctcccagttgcacgaaaaggtgctgtgtctagtgctctctacatggcatggttagaagctctatctaaggacctaccaccaatcctcctagttcgtgggaatcatcagagtgtccttaccttctattcataaatgttctatacagtggacagccctccagaatggtacttcagtgcctagtgtagtaacctgaaatcttcaatgacacattaacatcacaatggcgaatggtgacttttctttcacgatttcattaatttgaaagcacacaggaaagcttgctccattgataacgtgtatggagacttcggttttagtcaattccatatctcaatcttaatggtgattcttctctgttgaactgaagtttgtgagagtagttttcctttgctacttgaatagcaataaaagcgtgttaactttttggttgatgaaagaagtacaaaaagccctttagccttgaggtgccttctgaaattaaccaaatttcatccatatatcctcttttataaacttatagaatgtcaaactttgccttcaactgtttttatttctagtctcttccactttaaaacaaaatgaacactgcttgtcttcttccattgaccatttagtgttgagtactgtatgtgttttgttaattctataaaggtatctgttagatattaaaggtgagaattagggcaggttaatcaaaaatggggaaggggaaatggtaaccaaaaagtaaccccatggtaaggtttatatgagtatatgtgaatatagagctaggaaaaaaagcccccccaaatacctttttaacccctctgattggctattattactatatttattattatttattgaaaccttagggaagattgaagattcatcccatacttctatataccatgcttaaaaatcacgtcattctttaaacaaaaatactcaagatcatttatatttatttggagagaaaactgtcctaatttagaatttccctcaaatctgagggacttttaagaaatgctaacagatttttctggaggaaatttagacaaaacaatgtcatttagtagaatatttcagtatttaagtggaatttcagtatactgtactatcctttataagtcattaaaataatgtttcatcaaatggttaaatggaccactggtttcttagagaaatgtttttaggcttaattcattcaattgtcaagtacacttagtcttaatacactcaggtttgaacagattattctgaatattaaaatttaatccattcttaatattttaaaacttttgttaagaaaaactgccagtttgtgcttttgaaatgtctgttttgacatcatagtctagtaaaattttgacagtgcatatgtactgttactaaaagctttatatgaaattattaatgtgaagtttttcatttataattcaaggaaggatttcctgaaaacatttcaagggatttatgtctacatatttgtgtgtgtgtgtgtatatatatgtaatatgcatacacagatgcatatgtgtatatataatgaaatttatgttgctggtattttgcattttaaagtgatcaagattcattaggcaaactttggtttaagtaaacatatgttcaaaatcaaattaacagatacaggtttcatagagaacaaaggtgatcatttgaagggcatgctgtaatttcacacaattttccagttcaaaaatggagaatacttcgcctaaaatactgttaagtgggttaattgatacaagtttctgtggtggaaaatttatgcaggttttcacgaatccttttttttttttttttttttttgagacggagtctcgctctgttgccacgctggaatgcagtaacgtgatctcggctcactgcgacctccacctccccagttcaagcgattctcctgcctcagcctccctagtagctgggactacgggtgcacgccaccatgcccagctaatttttgtattttgagtagagacagggtttcaccgtgttggctaggatggtgtctatctcttgaccttgtgatccacccgcctcagcctcccagagtgctgggattacaggtgcgagccactgcgcctggctggttttcatgaatcttgatagacatctataacgttattattttcagtggtgtgcagcatttttgcttcatgagtatgacctaggtatagagatctgataacttgaattcagaatattaagaaaatgaagtaactgactttctaaaaaaaaaaaaaaaaaaaaatttctacattataactcacagcattgttccattgcaggttttgcaatgtttgggggtaaagacagtagaaatattattcagtaaacaataatgtgtgaacttttaagatggataatagggcatggactgagtgctgctatcttgaaatgtgcacaggtacacttacctttttttttttttttttaagtttttcccattcaggaaaacaacattgtgatctgtactacaggaaccaaatgtcatgcgtcatacatgtgggtataaagtacataaaatatatctaactattcataatgtggggtgggtaatactgtctgtgaaataatgtaagaagcttttcacttaaaaaaaatgcattactttcacttaacactagacaccaggtcgaaaattttcaaggttatagtacttatttcaacaattcttagagatgctagctagtgttgaagctaaaaatagctttatttatgctgaattgtgatttttttatgccaaaatttttttagttctaatcattgatgatagcttggaaataaataattatgccatggcatttgacagttcattattcctataagaattaaattgagtttagagagaatggtggtgttgagctgattattaacagttactgaaatcaaatatttatttgttacattattccatttgtattttaggtttccttttacattctttttatatgcattctgacattacatattttttaagactatggaaataatttaaagatttaagctctggtggatgattatctgctaagtaagtctgaaaatgtaatattttgataatactgtaatatacctgtcacacaaatgcttttctaatgttttaaccttgagtattgcagttgctgctttgtacagaggttactgcaataaaggaagtggattcattaaacctaaaaaaaaaaaaaaaaaaa

SEQ ID NO: 191 - protein, 1212 aa, Homo Sapiens
MEPRPTAPSSGAPGLAGVGETPSAAALAAARVELPGTAVPSVPEDAAPASRDGGGVRDEGPAAAGDGLGRPLGPTPSQSRFQVDLVSENAGRAAAAAAAAAAAAAAAGAGAGAKQTPADGEASGESEPAKGSEEAKGRFRVNFVDPAASSSAEDSLSDAAGVGVDGPNVSFQNGGDTVLSEGSSLHSGGGGGSGHHQHYYYDTHTNTYYLRTFGHNTMDAVPRIDHYRHTAAQLGEKLLRPSLAELHDELEKEPFEDGFANGEESTPTRDAVVTYTAESKGVVKFGWIKGVLVRCMLNIWGVMLFIRLSWIVGQAGIGLSVLVIMMATVVTTITGLSTSAIATNGFVRGGGAYYLISRSLGPEFGGAIGLIFAFANAVAVAMYVVGFAETVVELLKEHSILMIDEINDIRIIGAITVVILLGISVAGMEWEAKAQIVLLVILLLAIGDFVIGTFIPLESKKPKGFFGYKSEIFNENFGPDFREEETFFSVFAIFFPAATGILAGANISGDLADPQSAIPKGTLLAILITTLVYVGIAVSVGSCVVRDATGNVNDTIVTELTNCTSAACKLNFDFSSCESSPCSYGLMNNFQVMSMVSGFTPLISAGIFSATLSSALASLVSAPKIFQALCKDNIYPAFQMFAKGYGKNNEPLRGYILTFLIALGFILIAELNVIAPIISNFFLASYALINFSVFHASLAKSPGWRPAFKYYNMWISLLGAILCCIVMFVINWWAALLTYVIVLGLYIYVTYKKPDVNWGSSTQALTYLNALQHSIRLSGVEDHVKNFRPQCLVMTGAPNSRPALLHLVHDFTKNVGLMICGHVHMGPRRQAMKEMSIDQAKYQRWLIKNKMKAFYAPVHADDLREGAQYLMQAAGLGRMKPNTLVLGFKKDWLQADMRDVDMYINLFHDAFDIQYGVVVIRLKEGLDISHLQGQEELLSSQEKSPGTKDVVVSVEYSKKSDLDTSKPLSEKPITHKVEEEDGKTATQPLLKKESKGPIVPLNVADQKLLEASTQFQKKQGKNTIDVWWLFDDGGLTLLIPYLLTTKKKWKDCKIRVFIGGKINRIDHDRRAMATLLSKFRIDFSDIMVLGDINTKPKKENIIAFEEIIEPYRLHEDDKEQDIADKMKEDEPWRITDNELELYKTKTYRQIRLNELLKEHSSTANIIVMSLPVARKGAVSSALYMAWLEALSKDLPPILLVRGNHQSVLTFYS

SEQ ID NO: 192 - DNA, 2133 bp, Homo Sapiens
  CDS (58)...(969)
cgggagagcgcgctctgcctgccgcctgcctgcctgccactgagggttcccagcaccatgagggcctggatcttctttctcctttgcctggccgggagggccttggcagcccctcagcaagaagccctgcctgatgagacagaggtggtggaagaaactgtggcagaggtgactgaggtatctgtgggagctaatcctgtccaggtggaagtaggagaatttgatgatggtgcagaggaaaccgaagaggaggtggtggcggaaaatccctgccagaaccaccactgcaaacacggcaaggtgtgcgagctggatgagaacaacacccccatgtgcgtgtgccaggaccccaccagctgcccagcccccattggcgagtttgagaaggtgtgcagcaatgacaacaagaccttcgactcttcctgccacttctttgccacaaagtgcaccctggagggcaccaagaagggccacaagctccacctggactacatcgggccttgcaaatacatccccccttgcctggactctgagctgaccgaattccccctgcgcatgcgggactggctcaagaacgtcctggtcaccctgtatgagagggatgaggacaacaaccttctgactgagaagcagaagctgcgggtgaagaagatccatgagaatgagaagcgcctggaggcaggagaccaccccgtggagctgctggcccgggacttcgagaagaactataacatgtacatcttccctgtacactggcagttcggccagctggaccagcaccccattgacgggtacctctcccacaccgagctggctccactgcgtgctcccctcatccccatggagcattgcaccacccgctttttcgagacctgtgacctggacaatgacaagtacatcgccctggatgagtgggccggctgcttcggcatcaagcagaaggatatcgacaaggatcttgtgatctaaatccactccttccacagtaccggattctctctttaaccctccccttcgtgtttcccccaatgtttaaaatgtttggatggtttgttgttctgcctggagacaaggtgctaacatagatttaagtgaatacattaacggtgctaaaaatgaaaattctaacccaagacatgacattcttagctgtaacttaactattaaggccttttccacacgcattaatagtcccatttttctcttgccatttgtagctttgcccattgtcttattggcacatgggtggacacggatctgctgggctctgccttaaacacacattgcagcttcaacttttctctttagtgttctgtttgaaactaatacttaccgagtcagactttgtgttcatttcatttcagggtcttggctgcctgtgggcttccccaggtggcctggaggtgggcaaagggaagtaacagacacacgatgttgtcaaggatggttttgggactagaggctcagtggtgggagagatccctgcagaatccaccaaccagaacgtggtttgcctgaggctgtaactgagagaaagattctggggctgtcttatgaaaatatagacattctcacataagcccagttcatcaccatttcctcctttacctttcagtgcagtttcttttcacattaggctgttggttcaaacttttgggagcacggactgtcagttctctgggaagtggtcagcgcatcctgcagggcttctcctcctctgtcttttggagaaccagggctcttctcaggggctctagggactgccaggctgtttcagccaggaaggccaaaatcaagagtgagatgtagaaagttgtaaaatagaaaaagtggagttggtgaatcggttgttctttcctcacatttggatgattgtcataaggtttttagcatgttcctccttttcttcaccctcccctttgttcttctattaatcaagagaaacttcaaagttaatgggatggtcggatctcacaggctgagaactcgttcacctccaagcatttcatgaaaaagctgcttcttattaatcatacaaactctcaccatgatgtgaagagtttcacaaatctttcaaaataaaaagtaatgacttagaaactgaaaaaaaaaaaaaaaaaaaaaaaaaaaaaa

SEQ ID NO: 193 - protein, 303 aa, Homo Sapiens
MRAWIFFLLCLAGRALAAPQQEALPDETEVVEETVAEVTEVSVGANPVQVEVGEFDDGAEETEEEVVAENPCQNHHCKHGKVCELDENNTPMCVCQDPTSCPAPIGEFEKVCSNDNKTFDSSCHFFATKCTLEGTKKGHKLHLDYIGPCKYIPPCLDSELTEFPLRMRDWLKNVLVTLYERDEDNNLLTEKQKLRVKKIHENEKRLEAGDHPVELLARDFEKNYNMYIFPVHWQFGQLDQHPIDGYLSHTELAPLRAPLIPMEHCTTRFFETCDLDNDKYIALDEWAGCFGIKQKDIDKDLVI

SEQ ID NO: 194 - DNA, 1903 bp, Homo Sapiens
  CDS (247)...(810)
aataaaattaaggaaatcaaagaaaatgattttaaaggactcacttcactttatggtctgatcctgaacaacaacaagctaacgaagattcacccaaaagcctttctaaccacaaagaagttgcgaaggctgtatctgtcccacaatcaactaagtgaaataccacttaatcttcccaaatcattagcagaactcagaattcatgaaaataaagttaagaaaatacaaaaggacacattcaaaggaatgaatgctttacacgttttggaaatgagtgcaaaccctcttgataataatgggatagagccaggggcatttgaaggggtgacggtgttccatatcagaattgcagaagcaaaactgacctcagttcctaaaggcttaccaccaactttattggagcttcacttagattataataaaatttcaacagtggaacttgaggattttaaacgatacaaagaactacaaaggctgggcctaggaaacaacaaaatcacagatatcgaaaatgggagtcttgctaacataccacgtgtgagagaaatacatttggaaaacaataaactaaaaaaaatcccttcaggattaccagagttgaaatacctccagataatcttccttcattctaattcaattgcaagagtgggagtaaatgacttctgtccaacagtgccaaagatgaagaaatctttatacagtgcaataagtttattcaacaacccggtgaaatactgggaaatgcaacctgcaacatttcgttgtgttttgagcagaatgagtgttcagcttgggaactttggaatgtaataattagtaattggtaatgtccatttaatataagattcaaaaatccctacatttggaatacttgaactctattaataatggtagtattatatatacaagcaaatatctattctcaagtggtaagtccactgacttattttatgacaagaaatttcaacggaattttgccaaactattgatacataagggttgagagaaacaagcatctattgcagtttctttttgcgtacaaatgatcttacataaatctcatgcttgaccattcctttcttcataacaaaaaagtaagatattcggtatttaacactttgttatcaagcacattttaaaaagagctgtactgtaaatggaatgcttgacttagcaaaatttgtgctctttcatttgctgttagaaaaacagaattaacaaagacagtaatgtgaagagtgcattacactattcttattctttagtagcttgggtagtactgtaatatttttaatcatcttaaagtatgatttgatataatcttattgaaattaccttatcatgtcttagagcccgtctttatgtttaaaactaatttcttaaaataaagccttcagtaaatgttcattaccaacttgataaatgctactcataagagctggtttggggctatagcatatgcttttttttttttaattattacctgatttaaaaatctctgtaaaaacgtgtagtgtttcataaaatctgtaactcgcattttaatgatccgctattataagcttttaatagcatgaaaattgttaggctatataacattgccacttcaactctaaggaatatttttgagatatccctttggaagaccttgcttggaagagcctggacactaacaattctacaccaaattgtctcttcaaatacgtatggactggataactctgagaaacacatctagtataactgaataagcagagcatcaaattaaacagacagaaaccgaaagctctatataaatgctcagagttctttatgtatttcttattggcattcaacatatgtaaaatcagaaaacagggaaattttcattaaaaatattggtttgaaaaaaaaaaaaaaaaaa

SEQ ID NO: 195 - protein, 187 aa, Homo Sapiens
MNALHVLEMSANPLDNNGIEPGAFEGVTVFHIRIAEAKLTSVPKGLPPTLLELHLDYNKISTVELEDFKRYKELQRLGLGNNKITDIENGSLANIPRVREIHLENNKLKKIPSGLPELKYLQIIFLHSNSIARVGVNDFCPTVPKMKKSLYSAISLFNNPVKYWEMQPATFRCVLSRMSVQLGNFGM

SEQ ID NO: 196 - DNA, 2133 bp, Homo Sapiens
  CDS (419)...(1816)
ctgagttcctctaatccctgtgttccttctcccccatctttctaaaacccttctctgagagaggaataactatagcttcagggataatatagctttaaggaaacttttggcagatgtggacgtcgtaacatctgggcagtgttaacagaatcccggaggccgggacagaccaggagccactcgttctaggaatgttaaagtagaaggttttttccaattgatgagaggagcagagaggaaggagaaagaggaggagagagaaaaagggcacaaaataccataaaacagatcccatatttctgcttcccctcacttttagaagttaattgatggctgacttctgaaagtcactttcctttgccctggtacttcaggccatatacatcttttcttgtctccataatcctccctttcaaggatggccagtcagctaactcaaagaggagctctctttctgctgttcttcctaactccggcagtgacaccaacatggtatgcaggttctggctactatccggatgaaagctacaatgaagtatatgcagaggaggtcccacaggctcctgccctggactaccgagtcccccgatggtgttatacattaaatatccaggatggagaagccacatgctactcaccgaagggaggaaattatcacagcagcctgggcacgcgttgtgagctctcctgtgaccggggctttcgattgattggaaggaggtcggtgcaatgcctgccaagccgtcgttggtctggaactgcctactgcaggcagatgagatgccacgcactaccattcatcactagtggcacttacacctgcacaaatggagtgcttcttgactctcgctgtgactacagctgttccagtggctaccacctggaaggtgatcgcagccgaatctgcatggaagatgggagatggagtggaggcgagcctgtatgtgtagacatagatccccccaagatccgctgtccccactcacgtgagaagatggcagagccagagaaattgactgctcgagtatactgggacccaccgttggtgaaagattctgctgatggtaccatcaccagggtgacacttcggggccctgagcctggctctcactttcccgaaggagagcatgtgattcgttacactgcctatgaccgagcctacaaccgggccagctgcaagttcattgtgaaagtacaagtgagacgctgcccaactctgaaacctccgcagcacggctacctcacctgcacctcagcgggggacaactatggtgccacctgtgaataccactgtgatggcggttatgatcgccaggggacaccctcccgggtctgtcagtccagccgccagtggtcaggttcaccaccaatctgtgctcctatgaagattaacgtcaacgtcaactcagctgctggtctcttggatcaattctatgagaaacagcgactcctcatcatctcagctcctgatccttccaaccgatattataaaatgcagatctctatgctacagcaatccacctgtggactggatttgcggcatgtgaccatcattgaactggtgggacagccacctcaggaggtggggcgcatccgggagcaacagctgtcagccaacatcatcgaggagctcaggcaatttcagcgcctcactcgctcctacttcaacatggtgttgattgacaagcagggtattgaccgagaccgctacatggaacctgtcacccccgaggaaatcttcacattcattgatgactacctactgagcaatcaggagttgacccagcgtcgggagcaaagggacatatgcgagtgaacttgagccagggcatggttaaagtcaagggaaaagctcctctagttagctgaaactgggacctaataaaaggaggaaatgttttcccacagttctagggacaggactctgaggtgggtgagtttgacaaatcctgcagtgtttccaggcatccttttaggactgtgtaatagtttccctagaagctaggtagggactgaggacaggccttgggcagtgggttgggggtagaagttcttcctttcctaacccgggcccctgcccagctctccaaagtctttcagaaaagtaaatcctaaattcagtgaaaaaaaaac

SEQ ID NO: 197 - protein, 465 aa, Homo Sapiens
MASQLTQRGALFLLFFLTPAVTPTWYAGSGYYPDESYNEVYAEEVPQAPALDYRVPRWCYTLNIQDGEATCYSPKGGNYHSSLGTRCELSCDRGFRLIGRRSVQCLPSRRWSGTAYCRQMRCHALPFITSGTYTCTNGVLLDSRCDYSCSSGYHLEGDRSRICMEDGRWSGGEPVCVDIDPPKIRCPHSREKMAEPEKLTARVYWDPPLVKDSADGTITRVTLRGPEPGSHFPEGEHVIRYTAYDRAYNRASCKFIVKVQVRRCPTLKPPQHGYLTCTSAGDNYGATCEYHCDGGYDRQGTPSRVCQSSRQWSGSPPICAPMKINVNVNSAAGLLDQFYEKQRLLIISAPDPSNRYYKMQISMLQQSTCGLDLRHVTIIELVGQPPQEVGRIREQQLSANIIEELRQFQRLTRSYFNMVLIDKQGIDRDRYMEPVTPEEIFTFIDDYLLSNQELTQRREQRDICE

SEQ ID NO: 198 - DNA, 5540 bp, Homo Sapiens
  CDS (144)...(1838)
aattgcttccggggagttgcgagggagcgagggggaataaaggacccgcgaggaagggcccgcggatggcgcgtccctgagggtcgtggcgagttcgcggagcgtgggaaggagcggaccctgctctccccgggctgcgggccatggccacggcggagcggagagccctcggcatcggcttccagtggctctctttggccactctggtgctcatctgcgccgggcaagggggacgcagggaggatgggggtccagcctgctacggcggatttgacctgtacttcattttggacaaatcaggaagtgtgctgcaccactggaatgaaatctattactttgtggaacagttggctcacaaattcatcagcccacagttgagaatgtcctttattgttttctccacccgaggaacaaccttaatgaaactgacagaagacagagaacaaatccgtcaaggcctagaagaactccagaaagttctgccaggaggagacacttacatgcatgaaggatttgaaagggccagtgagcagatttattatgaaaacagacaagggtacaggacagccagcgtcatcattgctttgactgatggagaactccatgaagatctctttttctattcagagagggaggctaataggtctcgagatcttggtgcaattgtttactgtgttggtgtgaaagatttcaatgagacacagctggcccggattgcggacagtaaggatcatgtgtttcccgtgaatgacggctttcaggctctgcaaggcatcatccactcaattttgaagaagtcctgcatcgaaattctagcagctgaaccatccaccatatgtgcaggagagtcatttcaagttgtcgtgagaggaaacggcttccgacatgcccgcaacgtggacagggtcctctgcagcttcaagatcaatgactcggtcacactcaatgagaagcccttttctgtggaagatacttatttactgtgtccagcgcctatcttaaaagaagttggcatgaaagctgcactccaggtcagcatgaacgatggcctctcttttatctccagttctgtcatcatcaccaccacacactgttctgacggttccatcctggccatcgccctgctgatcctgttcctgctcctagccctggctctcctctggtggttctggcccctctgctgcactgtgattatcaaggaggtccctccaccccctgccgaggagagtgaggaagaagatgatgatggtctgcctaagaaaaagtggccaacggtagacgcctcttattatggtgggagaggcgttggaggcattaaaagaatggaggttcgttggggagaaaagggctccacagaagaaggtgctaagttggaaaaggcaaagaatgcaagagtcaagatgccggagcaggaatatgaattccctgagccgcgaaatctcaacaacaatatgcgtcggccttcttccccccggaagtggtactctccaatcaagggaaaactcgatgccttgtgggtcctactgaggaaaggatatgatcgtgtgtctgtgatgcgtccacagccaggagacacggggcgctgcatcaacttcaccagggtcaagaacaaccagccagccaagtacccactcaacaacgcctaccacacctcctcgccgcctcctgcccccatctacactcccccacctcctgcgccccactgccctcccccgccccccagcgcccctacccctcccatcccgtccccaccttccacccttccccctcctccccaggctccacctcccaacagggcacctcctccctcccgccctcctccaaggccttctgtctagagcccaaagttcctgctctgggctctctcagaaacttcaggagatgttagaacaagtctttccagttagagaagaggagtggtgataaagcccactgaccttcacacattctaaaaattggttggcaatgccagtataccaacaatcatgatcagctgaaagaaacagatattttaaattgccagaaaacaaatgatgaggcaactacagtcagatttatagccagccatctatcacctctagaaggttccagagacagtgaaactgcaagatgctctcaacaggattatgtctcatggagaccagtaagaaaatcatttatctgaaggtgaaatgcagagttggataagaaatacattgctgggtttctaaaatgctgccttcctgcctctactccacctccatccctggactttggacccttggcctaggagcctaaggaccttcacccctgtgcaccacccaagaaagaggaaaactttgcctacaactttggaaatgctggggtccctggtgtggtaagaaactcaacatcagacgggtatgcagaaggatgttcttctgggatttgcaggtacataaaaaatgtatggcatcttttccttgcaaattcttccagtttccaagtgagaaggggagcaggtgtttactgatggaaaaggtatgttgctatgttgatgtgtaagtgaaatcagttgtgtgcaatagacaggggcgtattcatgggagcatcagccagtttctaaaacccacaggccatcagcagctagaggtggctggctttggccagacatggaccctaaatcaacagacaatggcattgtcgaagagcaacctgttaatgaatcatgttaaaaatcaaggtttggcttcagtttaaatcacttgaggtatgaagtttatcctgttttccagagataaacataagttgatcttcccaaaataccatcattaggacctatcacacaatatcactagttttttttgtttgtttgttttttgttttttttcttggtaaagccatgcaccacagacttctgggcagagctgagagacaatggtcctgacataataaggatctttgattaacccccataaggcatgtgtgtgtatacaaatatacttctctttggcttttcgacatagaacctcagctgttaaccaaggggaaatacatcagatctgcaacacagaaatgctctgcctgaaatttccaccatgcctaggactcaccccatttatccaggtctttctggatctgtttaatcaataagccctataatcacttgctaaacactgggcttcatcacccagggataaaaacagagatcattgtcttggacctcctgcatcagcctattcaaaattatctctctctctagctttccacaaatcctaaaattcctgtcccaagccacccaaattctcagatcttttctggaacaaggcagaatataaaataaatatacatttagtggcttgggctatggtctccaaagatccttcaaaaatacatcaagccagcttcattcactcactttacttagaacagagatataagggcctgggatgcatttattttatcaataccaatttttgtggccatggcagacattgctaatcaatcacagcactatttcctattaagcccactgatttcttcacaatccttctcaaattacaattccaaagagccgccactcaacagtcagatgaacccaacagtcagatgagagaaatgaaccctacttgctatctctatcttagaaagcaaaaacaaacaggagtttccagggagaatgggaaagccagggggcataaaaggtacagtcaggggaaaatagatctaggcagagtgccttagtcagggaccacgggcgctgaatctgcagtgccaacaccaaactgacacatctccaggtgtacctccaaccctagccttctcccacagctgcctacaacagagtctcccagccttctcagagagctaaaaccagaaatttccagactcatgaaagcaaccccccagcctctccccaaccctgccgcattgtctaatttttagaacactaggcttcttctttcatgtagttcctcataagcaggggccagaatatctcagccacctgcagtgacattgctggacccctgaaaaccattccataggagaatgggttccccaggctcacagtgtagagacattgagcccatcacaactgttttgactgctggcagtctaaaacagtccacccaccccatggcactgccgcgtgattcccgcggccattcagaagttcaagccgagatgctgacgttgctgagcaacgagatggtgagcatcagtgcaaatgcaccattcagcacatcagtcatatgcccagtgcagttacaagatgttgtttcggcaaagcattttgatggaatagggaactgcaaatgtatgatgattttgaaaaggctcagcaggatttgttcttaaaccgactcagtgtgtcatccccggttatttagaattacagttaagaaggagaaacttctataagactgtatgaacaaggtgatatcttcatagtgggctattacaggcaggaaaatgttttaactggtttacaaaatccatcaatacttgtgtcattccctgtaaaaggcaggagacatgtgattatgatcaggaaactgcacaaaattattgttttcagcccccgtgttattgtccttttgaactgttttttttttattaaagccaaatttgtgttgtatatattcgtattccatgtgttagatggaagcatttcctatccagtgtgaataaaaagaacagttgtagtaaattattataaagccgatgatatttcatggcaggttattctaccaagctgtgcttgttggtttttcccatgactgtattgcttttataaatgtacaaatagttactgaaatgacgagacccttgtttgcacagcattaataagaaccttgataagaaccatattctgttgacagccagctcacagtttcttgcctgaagcttggtgcaccctccagtgagacacaagatctctcttttaccaaagttgagaacagagctggtggattaattaatagtcttcgatatctggccatgggtaacctcattgtaactatcatcagaatgggcagagatgatcttgaagtgtcacatacactaaagtccaaacactatgtcagatgggggtaaaatccattaaagaacaggaaaaaataattataagatgataagcaaatgtttcagcccaatgtcaacccagttaaaaaaaaaattaatgctgtgtaaaatggttgaattagtttgcaaactatataaagacatatgcagtaaaaagtctgttaatgcacatcctgtgggaatggagtgttctaaccaattgccttttcttgttatctgagctctcctatattatcatactcagataaccaaattaaaagaattagaatatgatttttaatacacttaacattaaactcttctaactttcttctttctgtgataattcagaagatagttatggatcttcaatgcctctgagtcattgttataaaaaatcagttatcactataccatgctataggagactgggcaaaacctgtacaatgacaaccctggaagttgctttttttaaaaaaataataaatttcttaaatcaaaaaaaaaaaaaaaaaaaa

SEQ ID NO: 199 - protein, 564 aa, Homo Sapiens
MATAERRALGIGFQWLSLATLVLICAGQGGRREDGGPACYGGFDLYFILDKSGSVLHHWNEIYYFVEQLAHKFISPQLRMSFIVFSTRGTTLMKLTEDREQIRQGLEELQKVLPGGDTYMHEGFERASEQIYYENRQGYRTASVIIALTDGELHEDLFFYSEREANRSRDLGAIVYCVGVKDFNETQLARIADSKDHVFPVNDGFQALQGIIHSILKKSCIEILAAEPSTICAGESFQVVVRGNGFRHARNVDRVLCSFKINDSVTLNEKPFSVEDTYLLCPAPILKEVGMKAALQVSMNDGLSFISSSVIITTTHCSDGSILAIALLILFLLLALALLWWFWPLCCTVIIKEVPPPPAEESEEEDDDGLPKKKWPTVDASYYGGRGVGGIKRMEVRWGEKGSTEEGAKLEKAKNARVKMPEQEYEFPEPRNLNNNMRRPSSPRKWYSPIKGKLDALWVLLRKGYDRVSVMRPQPGDTGRCINFTRVKNNQPAKYPLNNAYHTSSPPPAPIYTPPPPAPHCPPPPPSAPTPPIPSPPSTLPPPPQAPPPNRAPPPSRPPPRPSV

SEQ ID NO: 200 - DNA, 2691 bp, Homo Sapiens
  CDS (48)...(2099)
gcttgcccgtcggtcgctagctcgctcggtgcgcgtcgtcccgctccatggcgctcttcgtgcggctgctggctctcgccctggctctggccctgggccccgccgcgaccctggcgggtcccgccaagtcgccctaccagctggtgctgcagcacagcaggctccggggccgccagcacggccccaacgtgtgtgctgtgcagaaggttattggcactaataggaagtacttcaccaactgcaagcagtggtaccaaaggaaaatctgtggcaaatcaacagtcatcagctacgagtgctgtcctggatatgaaaaggtccctggggagaagggctgtccagcagccctaccactctcaaacctttacgagaccctgggagtcgttggatccaccaccactcagctgtacacggaccgcacggagaagctgaggcctgagatggaggggcccggcagcttcaccatcttcgcccctagcaacgaggcctgggcctccttgccagctgaagtgctggactccctggtcagcaatgtcaacattgagctgctcaatgccctccgctaccatatggtgggcaggcgagtcctgactgatgagctgaaacacggcatgaccctcacctctatgtaccagaattccaacatccagatccaccactatcctaatgggattgtaactgtgaactgtgcccggctcctgaaagccgaccaccatgcaaccaacggggtggtgcacctcatcgataaggtcatctccaccatcaccaacaacatccagcagatcattgagatcgaggacacctttgagacccttcgggctgctgtggctgcatcagggctcaacacgatgcttgaaggtaacggccagtacacgcttttggccccgaccaatgaggccttcgagaagatccctagtgagactttgaaccgtatcctgggcgacccagaagccctgagagacctgctgaacaaccacatcttgaagtcagctatgtgtgctgaagccatcgttgcggggctgtctgtagagaccctggagggcacgacactggaggtgggctgcagcggggacatgctcactatcaacgggaaggcgatcatctccaataaagacatcctagccaccaacggggtgatccactacattgatgagctactcatcccagactcagccaagacactatttgaattggctgcagagtctgatgtgtccacagccattgaccttttcagacaagccggcctcggcaatcatctctctggaagtgagcggttgaccctcctggctcccctgaattctgtattcaaagatggaacccctccaattgatgcccatacaaggaatttgcttcggaaccacataattaaagaccagctggcctctaagtatctgtaccatggacagaccctggaaactctgggcggcaaaaaactgagagtttttgtttatcgtaatagcctctgcattgagaacagctgcatcgcggcccacgacaagagggggaggtacgggaccctgttcacgatggaccgggtgctgacccccccaatggggactgtcatggatgtcctgaagggagacaatcgctttagcatgctggtagctgccatccagtctgcaggactgacggagaccctcaaccgggaaggagtctacacagtctttgctcccacaaatgaagccttccgagccctgccaccaagagaacggagcagactcttgggagatgccaaggaacttgccaacatcctgaaataccacattggtgatgaaatcctggttagcggaggcatcggggccctggtgcggctaaagtctctccaaggtgacaagctggaagtcagcttgaaaaacaatgtggtgagtgtcaacaaggagcctgttgccgagcctgacatcatggccacaaatggcgtggtccatgtcatcaccaatgttctgcagcctccagccaacagacctcaggaaagaggggatgaacttgcagactctgcgcttgagatcttcaaacaagcatcagcgttttccagggcttcccagaggtctgtgcgactagcccctgtctatcaaaagttattagagaggatgaagcattagcttgaagcactacaggaggaatgcaccacggcagctctccgccaatttctctcagatttccacagagactgtttgaatgttttcaaaaccaagtatcacactttaatgtacatgggccgcaccataatgagatgtgagccttgtgcatgtgggggaggagggagagagatgtactttttaaatcatgttccccctaaacatggctgttaacccactgcatgcagaaacttggatgtcactgcctgacattcacttccagagaggacctatcccaaatgtggaattgactgcctatgccaagtccctggaaaaggagcttcagtattgtggggctcataaaacatgaatcaagcaatccagcctcatgggaagtcctggcacagtttttgtaaagcccttgcacagctggagaaatggcatcattataagctatgagttgaaatgttctgtcaaatgtgtctcacatctacacgtggcttggaggcttttatggggccctgtccaggtagaaaagaaatggtatgtagagcttagatttccctattgtgacagagccatggtgtgtttgtaataataaaaccaaagaaacata

SEQ ID NO: 201 - protein, 683 aa, Homo Sapiens
MALFVRLLALALALALGPAATLAGPAKSPYQLVLQHSRLRGRQHGPNVCAVQKVIGTNRKYFTNCKQWYQRKICGKSTVISYECCPGYEKVPGEKGCPAALPLSNLYETLGVVGSTTTQLYTDRTEKLRPEMEGPGSFTIFAPSNEAWASLPAEVLDSLVSNVNIELLNALRYHMVGRRVLTDELKHGMTLTSMYQNSNIQIHHYPNGIVTVNCARLLKADHHATNGVVHLIDKVISTITNNIQQIIEIEDTFETLRAAVAASGLNTMLEGNGQYTLLAPTNEAFEKIPSETLNRILGDPEALRDLLNNHILKSAMCAEAIVAGLSVETLEGTTLEVGCSGDMLTINGKAIISNKDILATNGVIHYIDELLIPDSAKTLFELAAESDVSTAIDLFRQAGLGNHLSGSERLTLLAPLNSVFKDGTPPIDAHTRNLLRNHIIKDQLASKYLYHGQTLETLGGKKLRVFVYRNSLCIENSCIAAHDKRGRYGTLFTMDRVLTPPMGTVMDVLKGDNRFSMLVAAIQSAGLTETLNREGVYTVFAPTNEAFRALPPRERSRLLGDAKELANILKYHIGDEILVSGGIGALVRLKSLQGDKLEVSLKNNVVSVNKEPVAEPDIMATNGVVHVITNVLQPPANRPQERGDELADSALEIFKQASAFSRASQRSVRLAPVYQKLLERMKH

SEQ ID NO: 202 - DNA, 5784 bp, Homo Sapiens
  CDS (240)...(3758)
acggcatccagtacagaggggctggacttggacccctgcagcagccctgcacaggagaagcggcatataaagccgcgctgcccgggagccgctcggccacgtccaccggagcatcctgcactgcagggccggtctctcgctccagcagagcctgcgcctttctgactcggtccggaacactgaaaccagtcatcactgcatctttttggcaaaccaggagctcagctgcaggaggcaggatggtctggaggctggtcctgctggctctgtgggtgtggcccagcacgcaagctggtcaccaggacaaagacacgaccttcgaccttttcagtatcagcaacatcaaccgcaagaccattggcgccaagcagttccgcgggcccgaccccggcgtgccggcttaccgcttcgtgcgctttgactacatcccaccggtgaacgcagatgacctcagcaagatcaccaagatcatgcggcagaaggagggcttcttcctcacggcccagctcaagcaggacggcaagtccaggggcacgctgttggctctggagggccccggtctctcccagaggcagttcgagatcgtctccaacggccccgcggacacgctggatctcacctactggattgacggcacccggcatgtggtctccctggaggacgtcggcctggctgactcgcagtggaagaacgtcaccgtgcaggtggctggcgagacctacagcttgcacgtgggctgcgacctcataggaccagttgctctggacgagcccttctacgagcacctgcaggcggaaaagagccggatgtacgtggccaaaggctctgccagagagagtcacttcaggggtttgcttcagaacgtccacctagtgtttgaaaactctgtggaagatattctaagcaagaagggttgccagcaaggccagggagctgagatcaacgccatcagtgagaacacagagacgctgcgcctgggtccgcatgtcaccaccgagtacgtgggccccagctcggagaggaggcccgaggtgtgcgaacgctcgtgcgaggagctgggaaacatggtccaggagctctcggggctccacgtcctcgtgaaccagctcagcgagaacctcaagagagtgtcgaatgataaccagtttctctgggagctcattggtggccctcctaagacaaggaacatgtcagcttgctggcaggatggccggttctttgcggaaaatgaaacgtgggtggtggacagctgcaccacgtgtacctgcaagaaatttaaaaccatttgccaccaaatcacctgcccgcctgcaacctgcgccagtccatcctttgtggaaggcgaatgctgcccttcctgcctccactcggtggacggtgaggagggctggtctccgtgggcagagtggacccagtgctccgtgacgtgtggctctgggacccagcagagaggccggtcctgtgacgtcaccagcaacacctgcttggggccctcgatccagacacgggcttgcagtctgagcaagtgtgacacccgcatccggcaggacggcggctggagccactggtcaccttggtcttcatgctctgtgacctgtggagttggcaatatcacacgcatccgtctctgcaactccccagtgccccagatggggggcaagaattgcaaagggagtggccgggagaccaaagcctgccagggcgccccatgcccaatcgatggccgctggagcccctggtccccgtggtcggcctgcactgtcacctgtgccggtgggatccgggagcgcacccgggtctgcaacagccctgagcctcagtacggagggaaggcctgcgtgggggatgtgcaggagcgtcagatgtgcaacaagaggagctgccccgtggatggctgtttatccaacccctgcttcccgggagcccagtgcagcagcttccccgatgggtcctggtcatgcggcttctgccctgtgggcttcttgggcaatggcacccactgtgaggacctggacgagtgtgccctggtccccgacatctgcttctccaccagcaaggtgcctcgctgtgtcaacactcagcctggcttccactgcctgccctgcccgccccgatacagagggaaccagcccgtcggggtcggcctggaagcagccaagacggaaaagcaagtgtgtgagcccgaaaacccatgcaaggacaagacacacaactgccacaagcacgcggagtgcatctacctgggtcacttcagcgaccccatgtacaagtgcgagtgccagacaggctacgcgggcgacgggctcatctgcggggaggactcggacctggacggctggcccaacctcaatctggtctgcgccaccaacgccacctaccactgcatcaaggataactgcccccatctgccaaattctgggcaggaagactttgacaaggacgggattggcgatgcctgtgatgatgacgatgacaatgacggtgtgaccgatgagaaggacaactgccagctcctcttcaatccccgccaggctgactatgacaaggatgaggttggggaccgctgtgacaactgcccttacgtgcacaaccctgcccagatcgacacagacaacaatggagagggtgacgcctgctccgtggacattgatggggacgatgtcttcaatgaacgagacaattgtccctacgtctacaacactgaccagagggacacggatggtgacggtgtgggggatcactgtgacaactgccccctggtgcacaaccctgaccagaccgacgtggacaatgaccttgttggggaccagtgtgacaacaacgaggacatagatgacgacggccaccagaacaaccaggacaactgcccctacatctccaacgccaaccaggctgaccatgacagagacggccagggcgacgcctgtgaccctgatgatgacaacgatggcgtccccgatgacagggacaactgccggcttgtgttcaacccagaccaggaggacttggacggtgatggacggggtgatatttgtaaagatgattttgacaatgacaacatcccagatattgatgatgtgtgtcctgaaaacaatgccatcagtgagacagacttcaggaacttccagatggtccccttggatcccaaagggaccacccaaattgatcccaactgggtcattcgccatcaaggcaaggagctggttcagacagccaactcggaccccggcatcgctgtaggttttgacgagtttgggtctgtggacttcagtggcacattctacgtaaacactgaccgggacgacgactatgctggcttcgtctttggttaccagtcaagcagccgcttctatgtggtgatgtggaagcaggtgacgcagacctactgggaggaccagcccacgcgggcctatggctactccggcgtgtccctcaaggtggtgaactccaccacggggacgggcgagcacctgaggaacgcgctgtggcacacggggaacacgccggggcaggtgcgaaccttatggcacgaccccaggaacattggctggaaggactacacggcctataggtggcacctgactcacaggcccaagaccggctacatcagagtcttagtgcatgaaggaaaacaggtcatggcagactcaggacctatctatgaccaaacctacgctggcgggcggctgggtctatttgtcttctctcaagaaatggtctatttctcagacctcaagtacgaatgcagagatatttaaacaagatttgctgcatttccggcaatgccctgtgcatgccatggtccctagacacctcagttcattgtggtccttgcggcttctctctctagcagcacctcctgtcccttgaccttaactctgatggttcttcacctcctgccagcaaccccaaacccaagtgccttcagaggataaatatcaatggaactcagagatgaacatctaacccactagaggaaaccagtttggtgatatatgagactttatgtggagtgaaaattgggcatgccattacattgctttttcttgtttgtttaaaaagaatgacgtttacatataaaatgtaattacttattgtatttatgtgtatatggagttgaagggaatactgtgcataagccattatgataaattaagcatgaaaaatattgctgaactacttttggtgcttaaagttgtcactattcttgaattagagttgctctacaatgacacacaaatcccgctaaataaattataaacaagggtcaattcaaatttgaagtaatgttttagtaaggagagattagaagacaacaggcatagcaaatgacataagctaccgattaactaatcggaacatgtaaaacagttacaaaaataaacgaactctcctcttgtcctacaatgaaagccctcatgtgcagtagagatgcagtttcatcaaagaacaaacatccttgcaaatgggtgtgacgcggttccagatgtggatttggcaaaacctcatttaagtaaaaggttagcagagcaaagtgcggtgctttagctgctgcttgtgccgttgtggcgtcggggaggctcctgcctgagcttccttccccagctttgctgcctgagaggaaccagagcagacgcacaggccggaaaaggcgcatctaacgcgtatctaggctttggtaactgcggacaagttgcttttacctgatttgatgatacatttcattaaggttccagttataaatattttgttaatatttattaagtgactatagaatgcaactccatttaccagtaacttattttaaatatgcctagtaacacatatgtagtataatttctagaaacaaacatctaataagtatataatcctgtgaaaatatgaggcttgataatattaggttgtcacgatgaagcatgctagaagctgtaacagaatacatagagaataatgaggagtttatgatggaaccttaatatataatgttgccagcgattttagttcaatatttgttactgttatctatctgctgtatatggaattcttttaattcaaacgctgaaaacgaatcagcatttagtcttgccaggcacacccaataatcagtcatgtgtaatatgcacaagtttgtttttgtttttgttttttttgttggttggtttttttgctttaagttgcatgatctttctgcaggaaatagtcactcatcccactccacataaggggtttagtaagagaagtctgtctgtctgatgatggatagggggcaaatctttttcccctttctgttaatagtcatcacatttctatgccaaacaggaacgatccataactttagtcttaatgtacacattgcattttgataaaattaattttgttgtttcctttgaggttgatcgttgtgttgttttgctgcactttttacttttttgcgtgtggagctgtattcccgagacaacgaagcgttgggatacttcattaaatgtagcgactgtcaacagcgtgcaggttttctgtttctgtgttgtggggtcaaccgtacaatggtgtgggaatgacgatgatgtgaatatttagaatgtaccatattttttgtaaattatttatgtttttctaaacaaatttatcgtataggttgatgaaacgtcatgtgttttgccaaagactgtaaatatttatttatgtgttcacatggtcaaaatttcaccactgaaaccctgcacttagctagaacctcatttttaaagattaacaacaggaaataaattgtaaaaaaggttttct

SEQ ID NO: 203 - protein, 1172 aa, Homo Sapiens
MVWRLVLLALWVWPSTQAGHQDKDTTFDLFSISNINRKTIGAKQFRGPDPGVPAYRFVRFDYIPPVNADDLSKITKIMRQKEGFFLTAQLKQDGKSRGTLLALEGPGLSQRQFEIVSNGPADTLDLTYWIDGTRHVVSLEDVGLADSQWKNVTVQVAGETYSLHVGCDLIGPVALDEPFYEHLQAEKSRMYVAKGSARESHFRGLLQNVHLVFENSVEDILSKKGCQQGQGAEINAISENTETLRLGPHVTTEYVGPSSERRPEVCERSCEELGNMVQELSGLHVLVNQLSENLKRVSNDNQFLWELIGGPPKTRNMSACWQDGRFFAENETWVVDSCTTCTCKKFKTICHQITCPPATCASPSFVEGECCPSCLHSVDGEEGWSPWAEWTQCSVTCGSGTQQRGRSCDVTSNTCLGPSIQTRACSLSKCDTRIRQDGGWSHWSPWSSCSVTCGVGNITRIRLCNSPVPQMGGKNCKGSGRETKACQGAPCPIDGRWSPWSPWSACTVTCAGGIRERTRVCNSPEPQYGGKACVGDVQERQMCNKRSCPVDGCLSNPCFPGAQCSSFPDGSWSCGFCPVGFLGNGTHCEDLDECALVPDICFSTSKVPRCVNTQPGFHCLPCPPRYRGNQPVGVGLEAAKTEKQVCEPENPCKDKTHNCHKHAECIYLGHFSDPMYKCECQTGYAGDGLICGEDSDLDGWPNLNLVCATNATYHCIKDNCPHLPNSGQEDFDKDGIGDACDDDDDNDGVTDEKDNCQLLFNPRQADYDKDEVGDRCDNCPYVHNPAQIDTDNNGEGDACSVDIDGDDVFNERDNCPYVYNTDQRDTDGDGVGDHCDNCPLVHNPDQTDVDNDLVGDQCDNNEDIDDDGHQNNQDNCPYISNANQADHDRDGQGDACDPDDDNDGVPDDRDNCRLVFNPDQEDLDGDGRGDICKDDFDNDNIPDIDDVCPENNAISETDFRNFQMVPLDPKGTTQIDPNWVIRHQGKELVQTANSDPGIAVGFDEFGSVDFSGTFYVNTDRDDDYAGFVFGYQSSSRFYVVMWKQVTQTYWEDQPTRAYGYSGVSLKVVNSTTGTGEHLRNALWHTGNTPGQVRTLWHDPRNIGWKDYTAYRWHLTHRPKTGYIRVLVHEGKQVMADSGPIYDQTYAGGRLGLFVFSQEMVYFSDLKYECRDI

SEQ ID NO: 204 - DNA, 782 bp, Homo Sapiens
  CDS (63)...(686)
aggggccttagcgtgccgcatcgccgagatccagcgcccagagagacaccagagaacccaccatggccccctttgagcccctggcttctggcatcctgttgttgctgtggctgatagcccccagcagggcctgcacctgtgtcccaccccacccacagacggccttctgcaattccgacctcgtcatcagggccaagttcgtggggacaccagaagtcaaccagaccaccttataccagcgttatgagatcaagatgaccaagatgtataaagggttccaagccttaggggatgccgctgacatccggttcgtctacacccccgccatggagagtgtctgcggatacttccacaggtcccacaaccgcagcgaggagtttctcattgctggaaaactgcaggatggactcttgcacatcactacctgcagtttcgtggctccctggaacagcctgagcttagctcagcgccggggcttcaccaagacctacactgttggctgtgaggaatgcacagtgtttccctgtttatccatcccctgcaaactgcagagtggcactcattgcttgtggacggaccagctcctccaaggctctgaaaagggcttccagtcccgtcaccttgcctgcctgcctcgggagccagggctgtgcacctggcagtccctgcggtcccagatagcctgaatcctgcccggagtggaactgaagcctgcacagtgtccaccctgttcccactcccatctttcttccggacaatgaaataaagagttaccacccagc

SEQ ID NO: 205 - protein, 207 aa, Homo Sapiens
MAPFEPLASGILLLLWLIAPSRACTCVPPHPQTAFCNSDLVIRAKFVGTPEVNQTTLYQRYEIKMTKMYKGFQALGDAADIRFVYTPAMESVCGYFHRSHNRSEEFLIAGKLQDGLLHITTCSFVAPWNSLSLAQRRGFTKTYTVGCEECTVFPCLSIPCKLQSGTHCLWTDQLLQGSEKGFQSRHLACLPREPGLCTWQSLRSQIA

SEQ ID NO: 206 - DNA, 1421 bp, Homo Sapiens
  CDS (58)...(762)
acttactgcgggacggccttggagagtactcgggttcgtgaacttcccggaggcgcaatgagctgcattaacctgcccactgtgctgcccggctcccccagcaagacccgggggcagatccaggtgattctcgggccgatgttctcaggaaaaagcacagagttgatgagacgcgtccgtcgcttccagattgctcagtacaagtgcctggtgatcaagtatgccaaagacactcgctacagcagcagcttctgcacacatgaccggaacaccatggaggcgctgcccgcctgcctgctccgagacgtggcccaggaggccctgggcgtggctgtcataggcatcgacgaggggcagtttttccctgacatcatggagttctgcgaggccatggccaacgccgggaagaccgtaattgtggctgcactggatgggaccttccagaggaagccatttggggccatcctgaacctggtgccgctggccgagagcgtggtgaagctgacggcggtgtgcatggagtgcttccgggaagccgcctataccaagaggctcggcacagagaaggaggtcgaggtgattgggggagcagacaagtaccactccgtgtgtcggctctgctacttcaagaaggcctcaggccagcctgccgggccggacaacaaagagaactgcccagtgccaggaaagccaggggaagccgtggctgccaggaagctctttgccccacagcagattctgcaatgcagccctgccaactgagggacctgcaagggccgcccgctcccttcctgccactgccgcctactggacgctgccctgcatgctgcccagccactccaggaggaagtcgggaggcgtggagggtgaccacaccttggccttctgggaactctcctttgtgtggctgccccacctgccgcatgctccctcctctcctacccactggtctgcttaaagcttccctctcagctgctgggacgatcgcccaggctggagctggccccgcttggtggcctgggatctggcacactccctctccttggggtgagggacagagccccacgctgttgacatcagcctgcttcttcccctctgcggctttcactgctgagtttctgttctccctgggaagcctgtgccagcacctttgagccttggcccacactgaggcttaggcctctctgcctgggatgggctcccaccctcccctgaggatggcctggattcacgccctcttgtttccttttgggctcaaagcccttcctacctctggtgatggtttccacaggaacaacagcatctttcaccaagatgggtggcaccaaccttgctgggacttggatcccaggggcttatctcttcaagtgtggagagggcagggtccacgcctctgctgtagcttatgaaattaactaatt

SEQ ID NO: 207 - protein, 234 aa, Homo Sapiens
MSCINLPTVLPGSPSKTRGQIQVILGPMFSGKSTELMRRVRRFQIAQYKCLVIKYAKDTRYSSSFCTHDRNTMEALPACLLRDVAQEALGVAVIGIDEGQFFPDIMEFCEAMANAGKTVIVAALDGTFQRKPFGAILNLVPLAESVVKLTAVCMECFREAAYTKRLGTEKEVEVIGGADKYHSVCRLCYFKKASGQPAGPDNKENCPVPGKPGEAVAARKLFAPQQILQCSPAN

SEQ ID NO: 208 - DNA, 1141 bp, Homo Sapiens
  CDS (96)...(854)
tccttgggttcgggtgaaagcgcctgggggttcgtggccatgatccccgagctgctggagaactgaaggcggacagtctcctgcgaaaccaggcaatggcggagctggagtttgttcagatcatcatcatcgtggtggtgatgatggtgatggtggtggtgatcacgtgcctgctgagccactacaagctgtctgcacggtccttcatcagccggcacagccaggggcggaggagagaagatgccctgtcctcagaaggatgcctgtggccctcggagagcacagtgtcaggcaacggaatcccagagccgcaggtctacgccccgcctcggcccaccgaccgcctggccgtgccgcccttcgcccagcgggagcgcttccaccgcttccagcccacctatccgtacctgcagcacgagatcgacctgccacccaccatctcgctgtcagacggggaggagcccccaccctaccagggcccctgcaccctccagcttcgggaccccgagcagcagctggaactgaaccgggagtcggtgcgcgcacccccaaacagaaccatcttcgacagtgacctgatggatagtgccaggctgggcggcccctgcccccccagcagtaactcgggcatcagcgccacgtgctacggcagcggcgggcgcatggaggggccgccgcccacctacagcgaggtcatcggccactacccggggtcctccttccagcaccagcagagcagtgggccgccctccttgctggaggggacccggctccaccacacacacatcgcgcccctagagagcgcagccatctggagcaaagagaaggataaacagaaaggacaccctctctagggtccccaggggggccgggctggggctgcgtaggtgaaaaggcagaacactccgcgcttcttagaagaggagtgagaggaaggcggggggcgcagcaacgcatcgtgtggccctcccctcccacctccctgtgtataaatatttacatgtgatgtctggtctgaatgcacaagctaagagagcttgcaaaaaaaaaaagaaaaaagaaaaaaaaaaaccacgtttctttgttgagctgtgtcttgaaggcaaaagaaaaaaaatttctacagtaaaaaaaaaaaaaa

SEQ ID NO: 209 - protein, 252 aa, Homo Sapiens
MAELEFVQIIIIVVVMMVMVVVITCLLSHYKLSARSFISRHSQGRRREDALSSEGCLWPSESTVSGNGIPEPQVYAPPRPTDRLAVPPFAQRERFHRFQPTYPYLQHEIDLPPTISLSDGEEPPPYQGPCTLQLRDPEQQLELNRESVRAPPNRTIFDSDLMDSARLGGPCPPSSNSGISATCYGSGGRMEGPPPTYSEVIGHYPGSSFQHQQSSGPPSLLEGTRLHHTHIAPLESAAIWSKEKDKQKGHPL

SEQ ID NO: 210 - DNA, 4792 bp, Homo Sapiens
  CDS (37)...(4632)
ggaccacccagtaccgatcccttcacgaccgtcaccatggaagtgtcaccattgcagcctgtaaatgaaaatatgcaagtcaacaaaataaagaaaaatgaagatgctaagaaaagactgtctgttgaaagaatctatcaaaagaaaacacaattggaacatattttgctccgcccagacacctacattggttctgtggaattagtgacccagcaaatgtgggtttacgatgaagatgttggcattaactatagggaagtcacttttgttcctggtttgtacaaaatctttgatgagattctagttaatgctgcggacaacaaacaaagggacccaaaaatgtcttgtattagagtcacaattgatccggaaaacaatttaattagtatatggaataatggaaaaggtattcctgttgttgaacacaaagttgaaaagatgtatgtcccagctctcatatttggacagctcctaacttctagtaactatgatgatgatgaaaagaaagtgacaggtggtcgaaatggctatggagccaaattgtgtaacatattcagtaccaaatttactgtggaaacagccagtagagaatacaagaaaatgttcaaacagacatggatggataatatgggaagagctggtgagatggaactcaagcccttcaatggagaagattatacatgtatcacctttcagcctgatttgtctaagtttaaaatgcaaagcctggacaaagatattgttgcactaatggtcagaagagcatatgatattgctggatccaccaaagatgtcaaagtctttcttaatggaaataaactgccagtaaaaggatttcgtagttatgtggacatgtatttgaaggacaagttggatgaaactggtaactccttgaaagtaatacatgaacaagtaaaccacaggtgggaagtgtgtttaactatgagtgaaaaaggctttcagcaaattagctttgtcaacagcattgctacatccaagggtggcagacatgttgattatgtagctgatcagattgtgactaaacttgttgatgttgtgaagaagaagaacaagggtggtgttgcagtaaaagcacatcaggtgaaaaatcacatgtggatttttgtaaatgccttaattgaaaacccaacctttgactctcagacaaaagaaaacatgactttacaacccaagagctttggatcaacatgccaattgagtgaaaaatttatcaaagctgccattggctgtggtattgtagaaagcatactaaactgggtgaagtttaaggcccaagtccagttaaacaagaagtgttcagctgtaaaacataatagaatcaagggaattcccaaactcgatgatgccaatgatgcagggggccgaaactccactgagtgtacgcttatcctgactgagggagattcagccaaaactttggctgtttcaggccttggtgtggttgggagagacaaatatggggttttccctcttagaggaaaaatactcaatgttcgagaagcttctcataagcagatcatggaaaatgctgagattaacaatatcatcaagattgtgggtcttcagtacaagaaaaactatgaagatgaagattcattgaagacgcttcgttatgggaagataatgattatgacagatcaggaccaagatggttcccacatcaaaggcttgctgattaattttatccatcacaactggccctctcttctgcgacatcgttttctggaggaatttatcactcccattgtaaaggtatctaaaaacaagcaagaaatggcattttacagccttcctgaatttgaagagtggaagagttctactccaaatcataaaaaatggaaagtcaaatattacaaaggtttgggcaccagcacatcaaaggaagctaaagaatactttgcagatatgaaaagacatcgtatccagttcaaatattctggtcctgaagatgatgctgctatcagcctggcctttagcaaaaaacagatagatgatcgaaaggaatggttaactaatttcatggaggatagaagacaacgaaagttacttgggcttcctgaggattacttgtatggacaaactaccacatatctgacatataatgacttcatcaacaaggaacttatcttgttctcaaattctgataacgagagatctatcccttctatggtggatggtttgaaaccaggtcagagaaaggttttgtttacttgcttcaaacggaatgacaagcgagaagtaaaggttgcccaattagctggatcagtggctgaaatgtcttcttatcatcatggtgagatgtcactaatgatgaccattatcaatttggctcagaattttgtgggtagcaataatctaaacctcttgcagcccattggtcagtttggtaccaggctacatggtggcaaggattctgctagtccacgatacatctttacaatgctcagctctttggctcgattgttatttccaccaaaagatgatcacacgttgaagtttttatatgatgacaaccagcgtgttgagcctgaatggtacattcctattattcccatggtgctgataaatggtgctgaaggaatcggtactgggtggtcctgcaaaatccccaactttgatgtgcgtgaaattgtaaataacatcaggcgtttgatggatggagaagaacctttgccaatgcttccaagttacaagaacttcaagggtactattgaagaactggctccaaatcaatatgtgattagtggtgaagtagctattcttaattctacaaccattgaaatctcagagcttcccgtcagaacatggacccagacatacaaagaacaagttctagaacccatgttgaatggcaccgagaagacacctcctctcataacagactatagggaataccatacagataccactgtgaaatttgttgtgaagatgactgaagaaaaactggcagaggcagagagagttggactacacaaagtcttcaaactccaaactagtctcacatgcaactctatggtgctttttgaccacgtaggctgtttaaagaaatatgacacggtgttggatattctaagagacttttttgaactcagacttaaatattatggattaagaaaagaatggctcctaggaatgcttggtgctgaatctgctaaactgaataatcaggctcgctttatcttagagaaaatagatggcaaaataatcattgaaaataagcctaagaaagaattaattaaagttctgattcagaggggatatgattcggatcctgtgaaggcctggaaagaagcccagcaaaaggttccagatgaagaagaaaatgaagagagtgacaacgaaaaggaaactgaaaagagtgactccgtaacagattctggaccaaccttcaactatcttcttgatatgcccctttggtatttaaccaaggaaaagaaagatgaactctgcaggctaagaaatgaaaaagaacaagagctggacacattaaaaagaaagagtccatcagatttgtggaaagaagacttggctacatttattgaagaattggaggctgttgaagccaaggaaaaacaagatgaacaagtcggacttcctgggaaaggggggaaggccaaggggaaaaaaacacaaatggctgaagttttgccttctccgcgtggtcaaagagtcattccacgaataaccatagaaatgaaagcagaggcagaaaagaaaaataaaaagaaaattaagaatgaaaatactgaaggaagccctcaagaagatggtgtggaactagaaggcctaaaacaaagattagaaaagaaacagaaaagagaaccaggtacaaagacaaagaaacaaactacattggcatttaagccaatcaaaaaaggaaagaagagaaatccctggcctgattcagaatcagataggagcagtgacgaaagtaattttgatgtccctccacgagaaacagagccacggagagcagcaacaaaaacaaaattcacaatggatttggattcagatgaagatttctcagattttgatgaaaaaactgatgatgaagattttgtcccatcagatgctagtccacctaagaccaaaacttccccaaaacttagtaacaaagaactgaaaccacagaaaagtgtcgtgtcagaccttgaagctgatgatgttaagggcagtgtaccactgtcttcaagccctcctgctacacatttcccagatgaaactgaaattacaaacccagttcctaaaaagaatgtgacagtgaagaagacagcagcaaaaagtcagtcttccacctccactaccggtgccaaaaaaagggctgccccaaaaggaactaaaagggatccagctttgaattctggtgtctctcaaaagcctgatcctgccaaaaccaagaatcgccgcaaaaggaagccatccacttctgatgattctgactctaattttgagaaaattgtttcgaaagcagtcacaagcaagaaatccaagggggagagtgatgacttccatatggactttgactcagctgtggctcctcgggcaaaatctgtacgggcaaagaaacctataaagtacctggaagagtcagatgaagatgatctgttttaaaatgtgaggcgattattttaagtaattatcttaccaagcccaagactggttttaaagttacctgaagctcttaacttcctcccctctgaatttagtttggggaaggtgtttttagtacaagacatcaaagtgaagtaaagcccaagtgttctttagcttt

SEQ ID NO: 211 - protein, 1531 aa, Homo Sapiens [sequence omitted]

SEQ ID NO: 212 - DNA, 3018 bp, Homo Sapiens
  CDS (125)...(1891)
ctcctcacaggtgtgtctctagtcctcgtggttgcctgccccactccctgccgagacgcctgccagaaaggtcacctatcctgaaccccagcaagcctgaaacagctcagccaagcaccctgcgatggaagctgcagatgcctccaggagcaacgggtcgagcccagaagccagggatgcccggagcccgtcgggccccagtggcagcctggagaatggcaccaaggctgacggcaaggatgccaagaccaccaacgggcacggcggggaggcagctgagggcaagagcctgggcagcgccctgaagccaggggaaggtaggagcgccctgttcgcgggcaatgagtggcggcgacccatcatccagtttgtcgagtccggggacgacaagaactccaactacttcagcatggactctatggaaggcaagaggtcgccgtacgcagggctccagctgggggctgccaagaagccacccgttacctttgccgaaaagggcgagctgcgcaagtccattttctcggagtcccggaagcccacggtgtccatcatggagcccggggagacccggcggaacagctacccccgggccgacacgggccttttttcacggtccaagtccggctccgaggaggtgctgtgcgactcctgcatcggcaacaagcagaaggcggtcaagtcctgcctggtgtgccaggcctccttctgcgagctgcatctcaagccccacctggagggcgccgccttccgagaccaccagctgctcgagcccatccgggactttgaggcccgcaagtgtcccgtgcatggcaagacgatggagctcttctgccagaccgaccagacctgcatctgctacctttgcatgttccaggagcacaagaatcatagcaccgtgacagtggaggaggccaaggccgagaaggagacggagctgtcactgcaaaaggagcagctgcagctcaagatcattgagattgaggatgaagctgagaagtggcagaaggagaaggaccgcatcaagagcttcaccaccaatgagaaggccatcctggagcagaacttccgggacctggtgcgggacctggagaagcaaaaggaggaagtgagggctgcgctggagcagcgggagcaggatgctgtggaccaagtgaaggtgatcatggatgctctggatgagagagccaaggtgctgcatgaggacaagcagacccgggagcagctgcatagcatcagcgactctgtgttgtttctgcaggaatttggtgcattgatgagcaattactctctccccccacccctgcccacctatcatgtcctgctggagggggagggcctgggacagtcactaggcaacttcaaggacgacctgctcaatgtatgcatgcgccacgttgagaagatgtgcaaggcggacctgagccgtaacttcattgagaggaaccacatggagaacggtggtgaccatcgctatgtgaacaactacacgaacagcttcgggggtgagtggagtgcaccggacaccatgaagagatactccatgtacctgacacccaaaggtggggtccggacatcataccagccctcgtctcctggccgcttcaccaaggagaccacccagaagaatttcaacaatctctatggcaccaaaggtaactacacctcccgggtctgggagtactcctccagcattcagaactctgacaatgacctgcccgtcgtccaaggcagctcctccttctccctgaaaggctatccctccctcatgcggagccaaagccccaaggcccagccccagacttggaaatctggcaagcagactatgctgtctcactaccggccattctacgtcaacaaaggcaacgggattgggtccaacgaagccccatgagctcctggcggaaggaacgaggcgccacacccctgctcttcctcctgaccctgctgctcttgccttctaagctactgtgcttgtctgggtgggagggagcctggtcctgcacctgccctctgcagccctctgccagcctcttgggggcagttccggcctctccgacttccccactggccacactccattcagactcctttcctgccttgtgacctcagatggtcaccatcattcctgtgctcagaggccaacccatcacaggggtgagataggttggggcctgccctaacccgccagcctcctcctctcgggctggatctgggggctagcagtgagtacccgcatggtatcagcctgcctctcccgcccacgccctgctgtctccaggcctatagacgtttctctccaaggccctatcccccaatgttgtcagcagatgcctggacagcacagccacccatctcccattcacatggcccacctcctgcttcccagaggactggccctacgtgctctctctcgtcctacctatcaatgcccagcatggcagaacctgcagcccttggccactgcagatggaaacctctcagtgtcttgacatcaccctacccaggcggtgggtctccaccacagccactttgagtctgtggtccctggagggtggcttctcctgactggcaggatgaccttagccaagatattcctctgttccctctgctgagataaagaattcccttaacatgatataatccacccatgcaaatagctactggcccagctaccatttaccatttgcctacagaatttcattcagtctacactttggcattctctctggcgatggagtgtggctgggctgaccgcaaaaggtgccttacacactgcccccaccctcagccgttgccccatcagaggctgcctcctccttctgattaccccccatgttgcatatcagggtgctcaaggattggagaggagacaaaaccaggagcagcacagtggggacatctcccgtctcaacagccccaggcctatgggggctctggaaggatgggccagcttgcaggggttggggagggagacatccagcttgggctttcccctttggaataaaccattggtctgtc

SEQ ID NO: 213 - protein, 588 aa, Homo Sapiens
MEAADASRSNGSSPEARDARSPSGPSGSLENGTKADGKDAKTTNGHGGEAAEGKSLGSALKPGEGRSALFAGNEWRRPIIQFVESGDDKNSNYFSMDSMEGKRSPYAGLQLGAAKKPPVTFAEKGELRKSIFSESRKPTVSIMEPGETRRNSYPRADTGLFSRSKSGSEEVLCDSCIGNKQKAVKSCLVCQASFCELHLKPHLEGAAFRDHQLLEPIRDFEARKCPVHGKTMELFCQTDQTCICYLCMFQEHKNHSTVTVEEAKAEKETELSLQKEQLQLKIIEIEDEAEKWQKEKDRIKSFTTNEKAILEQNFRDLVRDLEKQKEEVRAALEQREQDAVDQVKVIMDALDERAKVLHEDKQTREQLHSISDSVLFLQEFGALMSNYSLPPPLPTYHVLLEGEGLGQSLGNFKDDLLNVCMRHVEKMCKADLSRNFIERNHMENGGDHRYVNNYTNSFGGEWSAPDTMKRYSMYLTPKGGVRTSYQPSSPGRFTKETTQKNFNNLYGTKGNYTSRVWEYSSSIQNSDNDLPVVQGSSSFSLKGYPSLMRSQSPKAQPQTWKSGKQTMLSHYRPFYVNKGNGIGSNEAP

SEQ ID NO: 214 - DNA, 1042 bp, Homo Sapiens
  CDS (29)...(832)
accgcggcgcgccgccctccgccgttatatgaggccccgctccggccccacgcggaacccgcggctccgagccttcgccggcgtcccgacccgaggccggacccgaggccagtcccgccgctgcgcagccgaagccagtgcggggcctgagagggacgcgcgccccggggcccccgccgcgggcaccatgggcgctgcccactccgcgtctgaggaggtgcgggagctcgagggcaagaccggcttctcatcggatcagatcgagcagctccatcggagatttaagcagctgagtggagatcagcctaccattcgcaaggagaacttcaacaatgtcccggacctggagctcaaccccatccgatccaaaattgttcgtgccttcttcgacaacaggaacctgcgcaagggacccagtggcctggctgatgagatcaatttcgaggacttcctgaccatcatgtcctacttccggcccatcgacaccaccatggacgaggaacaggtggagctgtcccggaaggagaagctgagatttctgttccacatgtacgactcggacagcgacggccgcatcactctggaagaatatcgaaatgtggtcgaggagctgctgtcgggaaaccctcacatcgagaaggagtccgctcgctccatcgccgacggggccatgatggaggcggccagcgtgtgcatggggcagatggagcctgatcaggtgtacgaggggatcaccttcgaggacttcctgaagatctggcaggggatcgacattgagaccaagatgcacgtccgcttccttaacatggaaaccatggccctctgccactgacccaccgccacctccgcggagaaactgcactttgcaatggggccgcctccccgcgtagctggagcagcccaggcccggcggacagcctcttcctgcagcgccggtacatagccaaggctcgtctgcgcaccttgtgtcttgtagggtatggtatgtgggacttcgctgtttttatctccaataaaaaaaaaaaaaaggtttgttaattaa

SEQ ID NO: 215 - protein, 267 aa, Homo Sapiens
MRPRSGPTRNPRLRAFAGVPTRGRTRGQSRRCAAEASAGPERDARPGAPAAGTMGAAHSASEEVRELEGKTGFSSDQIEQLHRRFKQLSGDQPTIRKENFNNVPDLELNPIRSKIVRAFFDNRNLRKGPSGLADEINFEDFLTIMSYFRPIDTTMDEEQVELSRKEKLRFLFHMYDSDSDGRITLEEYRNVVEELLSGNPHIEKESARSIADGAMMEAASVCMGQMEPDQVYEGITFEDFLKIWQGIDIETKMHVRFLNMETMALCH

SEQ ID NO: 216 - DNA, 1163 bp, Homo Sapiens
  CDS (49)...(699)
agatccagcaggtgcgcgaaaccgcggcgcgccgccctccgccgttatatgaggccccgctccggccccacgcggaacccgcggctccgagccttcgccggcgtcccgacccgaggccggacccgaggccagtcccgccgctgcgcagccgaagccagtgcggggcctgagagggacgcgcgccccggggcccccgccgcgggcaccatgggcgctgcccactccgcgtctgaggaggtgcgggagctcgagggcaagaccggcttctcatcggatcagatcgagcagctccatcggagatttaagcagctgagtggagatcagcctaccattcgcaaggagaacttcaacaatgtcccggacctggagctcaaccccatccgatccaaaattgttcgtgccttcttcgacaacaggaacctgcgcaagggacccagtggcctggctgatgagatcaatttcgaggacttcctgaccatcatgtcctacttccggcccatcgacaccaccatggacgaggaacaggtggagctgtcccggaaggagaagctgagatttctgttccacatgtacgactcggacagcgacggccgcatcactctggaagaatatcgaaatgtaaagtggtcgaggagctgctgtcgggaaaccctcacatctagaaggagtccgctcgctccatcgccgacggggccatgatggaggcggccagcgtgtgcatggggcagatggagcctgatcaggtgtacgaggggatcaccttcgaggacttcctgaagatctggcaggggatcgacattgagaccaagatgcacgtccgcttccttaacatggaaaccatggccctctgccactgacccaccgccacctccgcggagagactgcactttgcaatggggccgcctccccgcgtagctggagcagcccaggcccggcggacagcctcttcctgcagcgccggtacatagccaaggctcgtctgcgcaccttgtgtcttgtagggtatggtatgtgggacttcgctgtttttatctccaataaaaaaaaaaaaaaaaggtttgttaattaaaaaaaaaaaaaaaaagaaaaaaaaaaaaaaaaaaaaaaaaaaaaaagaaaaaaaaaaaaaaaaaaaaaaaaaaaaaaaaaaaaaaaaaaaaaaa

SEQ ID NO: 217 - protein, 216 aa, Homo Sapiens
MRPRSGPTRNPRLRAFAGVPTRGRTRGQSRRCAAEASAGPERDARPGAPAAGTMGAAHSASEEVRELEGKTGFSSDQIEQLHRRFKQLSGDQPTIRKENFNNVPDLELNPIRSKIVRAFFDNRNLRKGPSGLADEINFEDFLTIMSYFRPIDTTMDEEQVELSRKEKLRFLFHMYDSDSDGRITLEEYRNVKWSRSCCRETLTSRRSPLAPSPTGP

SEQ ID NO: 218 - DNA, 1115 bp, Homo Sapiens
  CDS (49)...(699)
agatccagcaggtgcgcgaaaccgcggcgcgccgccctccgccgttatatgaggccccgctccggccccacgcggaacccgcggctccgagccttcgccggcgtcccgacccgaggccggacccgaggccagtcccgccgctgcgcagccgaagccagtgcggggcctgagagggacgcgcgccccggggcccccgccgcgggcaccatgggcgctgcccactccgcgtctgaggaggtgcgggagctcgagggcaagaccggcttctcatcggatcagatcgagcagctccatcggagatttaagcagctgagtggagatcagcctaccattcgcaaggagaacttcaacaatgtcccggacctggagctcaaccccatccgatccaaaattgttcgtgccttcttcgacaacaggaacctgcgcaagggacccagtggcctggctgatgagatcaatttcgaggacttcctgaccatcatgtcctacttccggcccatcgacaccaccatggacgaggaacaggtggagctgtcccggaaggagaagctgagatttctgttccacatgtacgactcggacagcgacggccgcatcactctggaagaatatcgaaatgtaaagtggtcgaggagctgctgtcgggaaaccctcacatcgagaaggagtccgctcgctccatcgccgacggggccatgatggaggcggccagcgtgtgcatggggcagatgatctggcaggggatcgacattgagaccaagatgcacgtccgcttccttaacatggaaaccatggccctctgccactgacccaccgccacctccgcggagaaactgcactttgcaatggggccgcctccccgcgtagctggagcagcccaggcccggcggacagcctcttcctgcagcgccggtacatagccaaggctcgtctgcgcaccttgtgtcttgtagggtatggtatgtgggacttcgctgtttttatctccaataaaaaaaaaaaaaaaaggtttgttaattaaaaaaaaaaaaaaaaagaaaaaaaaaaaaaaaaaaaaaaaaaaaaaagaaaaaaaaaaaaaaaaaaaaaaaaaaaaaaaaaaaaaaaaaaaaaaa

SEQ ID NO: 219 - DNA, 1110 bp, Homo Sapiens
  CDS (49)...(804)
agatccagcaggtgcgcgaaaccgcggcgcgccgccctccgccgttatatgaggccccgctccggccccacgcggaacccgcggctccgagccttcgccggcgtcccgacccgaggccggacccgaggccagtcccgccgctgcgcagccgaagccagtgcggggcctgagagggacgcgcgccccggggcccccgccgcgggcaccatgggcgctgcccactccgcgtctgaggaggtgcgggagctcgagggcaagaccggcttctcatcggatcagatcgagcagctccatcggagatttaagcagctgagtggagatcagcctaccattcgcaaggagaacttcaacaatgtcccggacctggagctcaaccccatccgatccaaaattgttcgtgccttcttcgacaacaggaacctgcgcaagggacccagtggcctggctgatgagatcaatttcgaggacttcctgaccatcatgtcctacttccggcccatcgacaccaccatggacgaggaacaggtggagctgtcccggaaggagaagctgagatttctgttccacatgtacgactcggacagcgacggccgcatcactctggaagaatatcgaaatgtggtcgaggagctgctgtcgggaaaccctcacatcgagaaggagtccgctcgctccatcgccgacggggccatgatggaggcggccagcgtgtgcatggggcagatgatctggcaggggatcgacattgagaccaagatgcacgtccgcttccttaacatggaaaccatggccctctgccactgacccaccgccacctccgcggagaaactgcactttgcaatggggccgcctccccgcgtagctggagcagcccaggcccggcggacagcctcttcctgcagcgccggtacatagccaaggctcgtctgcgcaccttgtgtcttgtagggtatggtatgtgggacttcgctgtttttatctccaataaaaaaaaaaaaaaaaggtttgttaattaaaaaaaaaaaaaaaaagaaaaaaaaaaaaaaaaaaaaaaaaaaaaaagaaaaaaaaaaaaaaaaaaaaaaaaaaaaaaaaaaaaaaaaaaaaaaa

SEQ ID NO: 220 - protein, 251 aa, Homo Sapiens
MRPRSGPTRNPRLRAFAGVPTRGRTRGQSRRCAAEASAGPERDARPGAPAAGTMGAAHSASEEVRELEGKTGFSSDQIEQLHRRFKQLSGDQPTIRKENFNNVPDLELNPIRSKIVRAFFDNRNLRKGPSGLADEINFEDFLTIMSYFRPIDTTMDEEQVELSRKEKLRFLFHMYDSDSDGRITLEEYRNVVEELLSGNPHIEKESARSIADGAMMEAASVCMGQMIWQGIDIETKMHVRFLNMETMALCH

SEQ ID NO: 221 - DNA, 783 bp, Homo Sapiens
  CDS (41)...(580)
ggcacgagcgagttcctgtctctctgccaacgccgcccggatggcttcccaaaaccgcgacccagccgccactagcgtcgccgccgcccgtaaaggagctgagccgagcgggggcgccgcccggggtccggtgggcaaaaggctacagcaggagctgatgaccctcatgatgtctggcgataaagggatttctgccttccctgaatcagacaaccttttcaaatgggtagggaccatccatggagcagctggaacagtatatgaagacctgaggtataagctctcgctagagttccccagtggctacccttacaatgcgcccacagtgaagttcctcacgccctgctatcaccccaacgtggacacccagggtaacatatgcctggacatcctgaaggaaaagtggtctgccctgtatgatgtcaggaccattctgctctccatccagagccttctaggagaacccaacattgatagtcccttgaacacacatgctgccgagctctggaaaaaccccacagcttttaagaagtacctgcaagaaacctactcaaagcaggtcaccagccaggagccctgacccaggctgcccagcctgtccttgtgtcgtctttttaatttttccttagatggtctgtcctttttgtgatttctgtataggactctttatcttgagctgtggtatttttgttttgtttttgtcttttaaattaagcctcggttgagcccttgtatattaaataaatgcatttttgtccttttttaaaaaaaaaaaaaaaaaaa

SEQ ID NO: 222 - protein, 179 aa, Homo Sapiens
MASQNRDPAATSVAAARKGAEPSGGAARGPVGKRLQQELMTLMMSGDKGISAFPESDNLFKWVGTIHGAAGTVYEDLRYKLSLEFPSGYPYNAPTVKFLTPCYHPNVDTQGNICLDILKEKWSALYDVRTILLSIQSLLGEPNIDSPLNTHAAELWKNPTAFKKYLQETYSKQVTSQEP

SEQ ID NO: 223 - DNA, 777 bp, Homo Sapiens
  CDS (19)...(516)
ggccccttgtctgcagagatggctcccaatgcttcctgcctctgtgtgcatgtccgttccgaggaatgggatttaatgacctttgatgccaacccatatgacagcgtgaaaaaaatcaaagaacatgtccggtctaagaccaaggttcctgtgcaggaccaggttcttttgctgggctccaagatcttaaagccacggagaagcctctcatcttatggcattgacaaagagaagaccatccaccttaccctgaaagtggtgaagcccagtgatgaggagctgcccttgtttcttgtggagtcaggtgatgaggcaaagaggcacctcctccaggtgcgaaggtccagctcagtggcacaagtgaaagcaatgatcgagactaagacgggtataatccctgagacccagattgtgacttgcaatggaaagagactggaagatgggaagatgatggcagattacggcatcagaaagggcaacttactcttcctggcatcttattgtattggagggtgaccaccctggggatggggtgttggcaggggtcaaaaagcttatttcttttaatctcttactcaacgaacacatcttctgatgatttcccaaaattaatgagaatgagatgagtagagtaagatttgggtgggatgggtaggatgaagtatattgcccaactctatgtttctttgattctaacacaattaattaagtgacatgatttttactaatgtattactgagactagtaaataaatttttaaggcaaaatagagcattc

SEQ ID NO: 224 - protein, 165 aa, Homo Sapiens
MAPNASCLCVHVRSEEWDLMTFDANPYDSVKKIKEHVRSKTKVPVQDQVLLLGSKILKPRRSLSSYGIDKEKTIHLTLKVVKPSDEELPLFLVESGDEAKRHLLQVRRSSSVAQVKAMIETKTGIIPETQIVTCNGKRLEDGKMMADYGIRKGNLLFLASYCIGG

SEQ ID NO: 225 - DNA, 1657 bp, Homo Sapiens
  CDS (23)...(1066)
tgatggctcattctgtgaaaagatgctggataagtgggagaagatttgcagcactcaggacacaagcgtggaggtctatgagcacatcaactcgatgtctctggatataatcatgaaatgcgctttcagcaaggagaccaactgccagacaaacagcacccatgatccttatgcaaaagccatatttgaactcagcaaaatcatatttcaccgcttgtacagtttgttgtatcacagtgacataattttcaaactcagccctcagggctaccgcttccagaagttaagccgagtgttgaatcagtacacagatacaataatccaggaaagaaagaaatccctccaggctggggtaaagcaggataacactccgaagaggaagtaccaggattttctggatattgtcctttctgccaaggatgaaagtggtagcagcttctcagatattgatgtacactctgaagtgagcacattcctgttggcaggacatgacaccttggcagcaagcatctcctggatcctttactgcctggctctgaaccctgagcatcaagagagatgccgggaggaggtcaggggcatcctgggggatgggtcttctatcacttgggaccagctgggtgagatgtcgtacaccacaatgtgcatcaaggagacgtgccgattgattcctgcagtcccgtccatttccagagatctcagcaagccacttaccttcccagatggatgcacattgcctgcagggatcaccgtggttcttagtatttggggtcttcaccacaaccctgctgtctggaaaaacccaaaggtctttgaccccttgaggttctctcaggagaattctgatcagagacacccctatgcctacttaccattctcagctggatcaaggaactgcattgggcaggagtttgccatgattgagttaaaggtaaccattgccttgattctgctccacttcagagtgactccagaccccaccaggcctcttactttccccaaccattttatcctcaagcccaagaatgggatgtatttgcacctgaagaaactctctgaatgttagatctcagggtacaatgattaaacgtactttgtttttcgaagttaaatttacagctaatgatccaagcagatagaaagggatcaatgtatggtgggaggattggaggttggtgggataggggtctctgtgaagagatccaaaatcatttctaggtacacagtgtgtcagctagatctgtttctatataactttgggagattttcagatcttttctgttaaactttcactactattaatgctgtatacaccaatagactttcatatattttctgttgtttttaaaatagttttcagaattatgcaagtaataagtgcatgtatgctcactgtcaaaaattcccaacactagaaaatcatgtagaataaaaattttaaatctcacttcacttagccgacattccatgccctgaccaatcctactgcttttcctaaaaacagaataatttggtgtgcattctttcagactttttcctatacattttatatgtagaaatgtagcaatgtatttgtatagatgtgatcattcctatattgttattgatttttttcacttaataaaaattcaccttattccttaaaaaaaaaaaaaaa

SEQ ID NO: 226 - protein, 347 aa, Homo Sapiens
MLDKWEKICSTQDTSVEVYEHINSMSLDIIMKCAFSKETNCQTNSTHDPYAKAIFELSKIIFHRLYSLLYHSDIIFKLSPQGYRFQKLSRVLNQYTDTIIQERKKSLQAGVKQDNTPKRKYQDFLDIVLSAKDESGSSFSDIDVHSEVSTFLLAGHDTLAASISWILYCLALNPEHQERCREEVRGILGDGSSITWDQLGEMSYTTMCIKETCRLIPAVPSISRDLSKPLTFPDGCTLPAGITVVLSIWGLHHNPAVWKNPKVFDPLRFSQENSDQRHPYAYLPFSAGSRNCIGQEFAMIELKVTIALILLHFRVTPDPTRPLTFPNHFILKPKNGMYLHLKKLSEC

SEQ ID NO: 227 - DNA, 2603 bp, Homo Sapiens
  CDS (351)...(1895)
agcggagagtcgctgcagctgcggtggcggtggcggccactgcagctcagagcggcgcacgcggcggccggggcgggacgcggggccgggcgcggagaagtcggggcgggcggcagagaggccgggacgcggaccgggccggggcgcccacagccgcccgacggcgcccagagagcgcgcgccccgcagccccgcgcctagcccgccgggcatggggcgcgcggcagccgcctgaagccccggcctggcccggccgcacccggccggaggcggagggcagagcgcgcgcccagttgcccgggcaccaaatcggagcgcggcgtgcgggagggcccagagcaggactggaaatgtcctggccgcgccgcctcctgctcagatacctgttcccggccctcctgcttcacgggctgggagagggttctgccctccttcatccagacagcaggtctcatcctaggtccttagagaaaagtgcctggagggcttttaaggagtcacagtgccatcacatgctcaaacatctccacaatggtgcaaggatcacagtgcagatgccacctacaatcgagggccactgggtctccacaggctgtgaagtaaggtcaggcccagagttcatcacaaggtcctacagattctaccacaataacaccttcaaggcctaccaattttattatggcagcaaccggtgcacaaatcccacttatactctcatcatccggggcaagatccgcctccgccaggcctcctggatcatccgagggggcacggaagccgactaccagctgcacaacgtccaggtgatctgccacacagaggcggtggccgagaagctcggccagcaggtgaaccgcacatgcccgggcttcctcgcagacgggggtccctgggtgcaggacgtggcctatgacctctggcgagaggagaacggctgtgagtgcaccaaggccgtgaactttgccatgcatgaacttcagctcatccgggtggagaagcagtaccttcaccacaacctcgaccacctggtcgaggagctcttccttggtgacattcacactgatgccacccagaggatgttctaccggccctccagttaccagccccctctgcagaatgccaagaaccacgaccatgcctgcatcgcctgtcggatcatctatcggtcagacgagcaccaccctcccatcctgcccccaaaggcagacctgaccatcggcctgcacggggagtgggtgagccagcgctgtgaggtgcgccccgaagtcctcttcctcacccgccacttcatcttccatgacaacaacaacacctgggagggccactactaccactactcagacccggtgtgcaagcaccccaccttctccatctacgcccggggccgctacagccgcggcgtcctctcgtccagggtcatgggaggcaccgagttcgtgttcaaagtgaatcacatgaaggtcacccccatggatgcggccacagcctcactgctcaacgtcttcaacgggaatgagtgcggggccgagggctcctggcaggtgggcatccagcaggatgtgacccacaccaatggctgcgtggccctgggcatcaaactacctcacacggagtacgagatcttcaaaatggaacaggatgcccgggggcgctatctgctgttcaacggtcagaggcccagcgacgggtccagcccagacaggccagagaagagagccacgtcctaccagatgcccttggtccagtgtgcctcctcttcgccgagggcagaggacctcgcagaagacagtggaagcagcctgtatggccgggcccctgggaggcacacctggtccctgctgctggctgcacttgcctgccttgtccctctgctgcattggaacatccgcagatagaagttttagaaagttctatttttccaaaccaggattccttactattgacagatttgctttaccaaaagaaaagacatttattcttttgatgcacttgaatgccagagaactgtccttctttttctcctctccctccctcccagcccctgagtcatgaacagcaaggagtgtttgaagtttctgctttgaactccgtccagcctgatccctggcctgagcaacttcacaacagtaattgcactttaagacagcctagagttctggacgagcgtgtttggtagcagggatgaaagctagggcctcttatttttttctcttaattattattatatttctgagttaaacttagaagaaacaactatcaagctacaacttttcctgccattttcctgtggttgcagcctgtcttcctttgaaattgttttactctctgagttttatatgctggaatccaatgcagagttggtttgggactgtgatcaagacaccttttattaataaagaagagacacaggtgtagatatgtatatacaaaaagatgtacggtctggccaaaccaccttcccagcctttatgcaaaaaaaggggagaatcaaagctttcatttcagaaatgttgcgtggaaaagtatctgtaattaaagtttcgaagtaatttaaaaaaaaaaaaaaaaaaaaaaaaaaaaaaaaagaaaaaaaaaaaaaaaaa

SEQ ID NO: 228 - protein, 514 aa, Homo Sapiens
MSWPRRLLLRYLFPALLLHGLGEGSALLHPDSRSHPRSLEKSAWRAFKESQCHHMLKHLHNGARITVQMPPTIEGHWVSTGCEVRSGPEFITRSYRFYHNNTFKAYQFYYGSNRCTNPTYTLIIRGKIRLRQASWIIRGGTEADYQLHNVQVICHTEAVAEKLGQQVNRTCPGFLADGGPWVQDVAYDLWREENGCECTKAVNFAMHELQLIRVEKQYLHHNLDHLVEELFLGDIHTDATQRMFYRPSSYQPPLQNAKNHDHACIACRIIYRSDEHHPPILPPKADLTIGLHGEWVSQRCEVRPEVLFLTRHFIFHDNNNTWEGHYYHYSDPVCKHPTFSIYARGRYSRGVLSSRVMGGTEFVFKVNHMKVTPMDAATASLLNVFNGNECGAEGSWQVGIQQDVTHTNGCVALGIKLPHTEYEIFKMEQDARGRYLLFNGQRPSDGSSPDRPEKRATSYQMPLVQCASSSPRAEDLAEDSGSSLYGRAPGRHTWSLLLAALACLVPLLHWNIRR
